(19) United States
(12) Patent Application Publication
(10) Pub. No.: US 2003/0115639 A1
(43) Pub. Date: Jun. 19, 2003

(54) Expressed sequences of arabidopsis thaliana

(76) Inventors: Jorn Gorlach, Durham, NC (US); Yong-Qiang An, San Diego, CA (US); Carol M. Hamilton, Apex, NC (US); Jennifer L. Price, Raleigh, NC (US); Tracy M. Raines, Durham, NC (US); Yang Yu, Matinsville, NJ (US); Joshua G. Rameaka, Durham, NC (US); Amy Page, Durham, NC (US); Abraham V. Mathew, Cary, NC (US); Brooke L. Ledford, Holly Springs, NC (US); Jeffrey P. Woessner, Hillsborough, NC (US); William David Haas, Durham, NC (US); Carlos A. Garcia, Carrboro, NC (US); Maja Kricker, Pittsboro, NC (US); Ted Slater, Apex, NC (US); Keith R. Davis, Durham, NC (US); Keith Allen, Cary, NC (US); Neil Hoffman, Chapel Hill, NC (US); Patrick Hurban, Raleigh, NC (US)

Correspondence Address: PARADIGM GENETICS, INC, 108 ALEXANDER DRIVE, P O BOX 14528, RTP, NC, 27709-4528, US

(21) Appl. No.: 09/770,961

(22) Filed: Jan. 26, 2001

Related U.S. Application Data
(60) Provisional application No. 60/178,466, filed on Jan. 27, 2000.

(51) Int. Cl. A01H 5/00; C12Q 1/00; C07H 21/04

(52) U.S. Cl. 800/288; 435/4; 536/23.2; 536/23.6

(57) ABSTRACT

Isolated nucleotide compositions and sequences are provided for Arabidopsis thaliana genes. The nucleic acid compositions find use in identifying homologous or related genes; in producing compositions that modulate the expression or function of its encoded protein, mapping functional regions of the protein; and in studying associated physiological pathways. The genetic sequences may also be used for the genetic manipulation of cells, particularly of plant cells. The encoded gene products and modified organisms are useful for screening of biologically active agents, e.g. fungicides, insecticides, etc.; for elucidating biochemical pathways; and the like.

### CROSS-REFERENCE TO RELATED APPLICATION

[0001] This application claims the benefit of U.S. Provisional Application 60/178,466 Filed Jan. 27, 2000.

### FIELD OF INVENTION

[0002] The invention is in the field of polynucleotide sequences of a plant, particularly sequences expressed in arabidopsis thaliana.

### BACKGROUND OF THE INVENTION

[0003] Plants and plant products have vast commercial importance in a wide variety of areas including food crops for human and animal consumption, flavor enhancers for food, and production of specialty chemicals for use in products such as medicaments and fragrances. In considering food crops for humans and livestock, genes such as those involved in a plant's resistance to insects, plant viruses, and fungi; genes involved in pollination; and genes whose products enhance the nutritional value of the food, are of major importance. A number of such genes have been described, see, for example, McCaskill and Croteau (1999) Nature Biotechnol. 17:31-36.

[0004] Despite recent advances in methods for identification, cloning, and characterization of genes, much remains to be learned about plant physiology in general, including how plants produce many of the above-mentioned products; mechanisms for resistance to herbicides, insects, plant viruses, fungi; elucidation of genes involved in specific biosynthetic pathways; and genes involved in environmental tolerance, e.g., salt tolerance, drought tolerance, or tolerance to anaerobic conditions.

[0005] Arabidopsis thaliana is a model system for genetic, molecular and biochemical studies of higher plants. Features of this plant that make it a model system for genetic and molecular biology research include a small genome size, organized into five chromosomes and containing an estimated 20,000 genes, a rapid life cycle, prolific seed production and, since it is small, it can easily be cultivation in limited space. A. thaliana is a member of the mustard family (Brassicaceae) with a broad natural distribution throughout Europe, Asia, and North America. Many different ecotypes have been collected from natural populations and are available for experimental analysis. The entire life cycle, including seed germination, formation of a rosette plant, bolting of the main stem, flowering, and maturation of the first seeds, is completed in 6 weeks. A large number of mutant lines are available that affect nearly all aspects of its growth. These features greatly facilitate the isolation of fundamentally interesting and potentially important genes for agronomic development

[0006] Most gene products from higher plants exhibit adequate sequence similarity to deduced amino acid sequences of other plant genes to permit assignment of probable gene function, if it is known, in any higher plant. It is likely that there will be very few protein-encoding angiosperm genes that do not have orthologs or paralogs in Arabidopsis. The developmental diversity of higher plants may be largely due to changes in the cis-regulatory sequences of transcriptional regulators and not in coding sequences.

[0007] Many advances reported over the past few years offer clear evidence that this plant is not only a very important model species for basic research, but also extremely valuable for applied plant scientists and plant breeders. Knowledge gained from Arabidopsis can be used directly to develop desired traits in plants of other species.

### RELEVANT LITERATURE

[0008] Cold Spring Harbor Monograph 27 (1994) E. M. Meyerowitz and C. R. Somerville, eds. (CSH Laboratory Press). Annual Plant Reviews, Vol. 1: Arabidopsis (1998) M. Anderson and J. A. Roberts, eds. (CRC Press). Methods in Molecular Biology: Arabidopsis Protocols, Vol. 82 (1997) J. M. Martinez-Zapater and J. Salinas, eds. (CRC Press).

[0009] Mayer et al (1999) Nature 402(6763):769-77; “Sequence and analysis of chromosome 4 of the plant Arabidopsis thaliana”. Lin et al. (1999) 402(6763):761-8, “Sequence and analysis of chromosome 2 of the plant Arabidopsis thaliana”. Meinke et al. (1998) Science 282:662-682, “Arabidopsis thaliana: a model plant for genome analysis”. Somerville and Somerville (1999) Science 285:380-383, “Plant functional genomics”. Mozo et al. (1999) Nat. Genet. 22:271-275, “A complete BAC-based physical map of the Arabidopsis thaliana genome”.

### SUMMARY OF THE INVENTION

[0010] Novel nucleic acid sequences of Arabidopsis thaliana, their encoded polypeptides and variants thereof, genes corresponding to these nucleic acids, and proteins expressed by the genes, are provided.

[0011] The invention also provides diagnostic, prophylactic and therapeutic agents employing such novel nucleic acids, their corresponding genes or gene products, including expression constructs, probes, antisense constructs, and the like. The genetic sequences may also be used for the genetic manipulation of plant cells, particularly dicotyledonous plants. The encoded gene products and modified organisms are useful for introducing or improving disease resistance and stress tolerance into plants; screening of biologically active agents, e.g. fungicides, etc.; for elucidating biochemical pathways; and the like.

[0012] In one embodiment of the invention, a nucleic acid is provided that comprises a start codon; an optional intervening sequence; a coding sequence capable of hybridizing under stringent conditions as set forth in SEQ ID NO: 1 to 999; and an optional terminal sequence, wherein at least one of said optional sequences is present. Such a nucleic acid may correspond to naturally occurring Arabidopsis expressed sequences.

### DETAILED DESCRIPTION OF THE INVENTION

[0013] Novel nucleic acid sequences from Arabidopsis thaliana, their encoded polypeptides and variants thereof, genes corresponding to these nucleic acids and proteins expressed by the genes are provided. The invention also provides agents employing such novel nucleic acids, their corresponding genes or gene products, including expression constructs, probes, antisense constructs, and the like. The nucleotide sequences are provided in the attached SEQLIST.

[0014] Sequences include, but are not limited to, sequences that encode resistance proteins; sequences that encode tolerance factors; sequences encoding proteins or other factors that are involved, directly or indirectly in biochemical pathways such as metabolic or biosynthetic pathways, sequences involved in signal transduction, sequences involved in the regulation of gene expression, structural genes, and the like. Biosynthetic pathways of interest include, but are not limited to, biosynthetic pathways whose product (which may be an end product or an intermediate) is of commercial, nutritional, or medicinal value.

[0015] The sequences may be used in screening assays of various plant strains to determine the strains that are best capable of withstanding a particular disease or environmental stress. Sequences encoding activators and resistance proteins may be introduced into plants that are deficient in these sequences. Alternatively, the sequences may be introduced under the control of promoters that are convenient for induction of expression. The protein products may be used in screening programs for insecticides, fungicides and antibiotics to determine agents that mimic or enhance the resistance proteins. Such agents may be used in improved methods of treating crops to prevent or treat disease. The protein products may also be used in screening programs to identify agents which mimic or enhance the action of tolerance factors. Such agents may be used in improved methods of treating crops to enhance their tolerance to environmental stresses.

[0016] Still other embodiments of the invention provide methods for enhancing or inhibiting production of a biosynthetic product in a plant by introducing a nucleic acid of the invention into a plant cell, where the nucleic acid comprises sequences encoding a factor which is involved, directly or indirectly in a biosynthetic pathway whose products are of commercial, nutritional, or medicinal value include any factor, usually a protein or peptide, which regulates such a biosynthetic pathway; which is an intermediate in such a biosynthetic pathway; or which in itself is a product that increases the nutritional value of a food product; or which is a medicinal product; or which is any product of commercial value.

[0017] Transgenic plants containing the antisense nucleic acids of the invention are useful for identifying other mediators that may induce expression of proteins of interest; for establishing the extent to which any specific insect and/or pathogen is responsible for damage of a particular plant; for identifying other mediators that may enhance or induce tolerance to environmental stress; for identifying factors involved in biosynthetic pathways of nutritional, commercial, or medicinal value; or for identifying products of nutritional, commercial, or medicinal value.

[0018] In still other embodiments, the invention provides transgenic plants constructed by introducing a subject nucleic acid of the invention into a plant cell, and growing the cell into a callus and then into a plant; or, alternatively by breeding a transgenic plant from the subject process with a second plant to form an F1 or higher hybrid. The subject transgenic plants and progeny are used as crops for their enhanced disease resistance, enhanced traits of interest, for example size or flavor of fruit, length of growth cycle, etc., or for screening programs, e.g. to determine more effective insecticides, etc; used as crops which exhibit enhanced tolerance environmental stress; or used to produce a factor.

[0019] Those skilled in the art will recognize the agricultural advantages inherent in plants constructed to have either increased or decreased expression of resistance proteins; or increased or decreased tolerance to environmental factors; or which produce or over-produce one or more factors involved in a biosynthetic pathway whose product is of commercial, nutritional, or medicinal value. For example, such plants may have increased resistance to attack by predators, insects, pathogens, microorganisms, herbivores, mechanical damage and the like; may be more tolerant to environmental stress, e.g. may be better able to withstand drought conditions, freezing, and the like; or may produce a product not normally made in the plant, or may produce a product in higher than normal amounts, where the product has commercial, nutritional, or medicinal value. Plants which may be useful include dicotyledons and monocotyledons. Representative examples of plants in which the provided sequences may be useful include tomato, potato, tobacco, cotton, soybean, alfalfa, rape, and the like. Monocotyledons, more particularly grasses (Poaceae family) of interest, include, without limitation, Avena sativa (oat); Avena strigosa (black oat); Elymus (wild rye); Hordeum sp. including Hordeum vulgare (barley); Oryza sp., including Oryza glaberrima (African rice); Oryza longistaminata (long-staminate rice); Pennisetum americanum (pearl millet); Sorghum sp. (sorghum); Triticum sp., including Triticum aestivum (common wheat); Triticum durum (durum wheat); Zea mays (corn); etc.

### Nucleic Acid Compositions

[0020] The following detailed description describes the nucleic acid compositions encompassed by the invention, methods for obtaining cDNA or genomic DNA encoding a full-length gene product, expression of these nucleic acids and genes; identification of structural motifs of the nucleic acids and genes; identification of the function of a gene product encoded by a gene corresponding to a nucleic acid of the invention; use of the provided nucleic acids as probes, in mapping, and in diagnosis; use of the corresponding polypeptides and other gene products to raise antibodies; use of the nucleic acids in genetic modification of plant and other species; and use of the nucleic acids, their encoded gene products, and modified organisms, for screening and diagnostic purposes.

[0021] The scope of the invention with respect to nucleic acid compositions includes, but is not necessarily limited to, nucleic acids having a sequence set forth in any one of SEQ ID NOS: 1-999; nucleic acids that hybridize the provided sequences under stringent conditions; genes corresponding to the provided nucleic acids; variants of the provided nucleic acids and their corresponding genes, particularly those variants that retain a biological activity of the encoded gene product.

[0022] In one embodiment, the sequences of the invention provide a polypeptide coding sequence. The polypeptide coding sequence may correspond to a naturally expressed mRNA in Arabidopsis or other species, or may encode a fusion protein between one of the provided sequences and an exogenous protein coding sequence. The coding sequence is characterized by an ATG start codon, a lack of stop codons in-frame with the ATG, and a termination codon, that is, a continuous open frame is provided between the start and the stop codon. The sequence contained between the start and the stop codon will comprise a sequence capable of hybridizing under stringent conditions to a sequence set for in SEQ ID NO: 1-999, and may comprise the sequence set forth in the Seqlist.

[0023] Other nucleic acid compositions contemplated by and within the scope of the present invention will be readily apparent to one of ordinary skill in the art when provided with the disclosure here.

[0024] The invention features nucleic acids that are derived from Arabidopsis thaliana. Novel nucleic acid compositions of the invention of particular interest comprise a sequence set forth in any one of SEQ ID NOS: 1-999 or an identifying sequence thereof. An “identifying sequence” is a contiguous sequence of residues at least about 10 nt to about 20 nt in length, usually at least about 50 nt to about 100 nt in length, that uniquely identifies a nucleic acid sequence, e.g., exhibits less than 90%, usually less than about 80% to about 85% sequence identity to any contiguous nucleotide sequence of more than about 20 nt. Thus, the subject novel nucleic acid compositions include full length cDNAs or mRNAs that encompass an identifying sequence of contiguous nucleotides from any one of SEQ ID NOS: 1-999.

[0025] The nucleic acids of the invention also include nucleic acids having sequence similarity or sequence identity. Nucleic acids having sequence similarity are detected by hybridization under low stringency conditions, for example, at 50° C. and 10×SSC (0.9 M NaCl/0.09 M sodium citrate) and remain bound when subjected to washing at 55° C. in 1×SSC. Sequence identity can be determined by hybridization under stringent conditions, for example, at 50° C. or higher and 0.1×SSC (9 mM NaCl/0.9 mM sodium citrate). Hybridization methods and conditions are well known in the art, see U.S. Pat. No. 5,707,829. Nucleic acids that are substantially identical to the provided nucleic acid sequences, e.g. allelic variants, genetically altered versions of the gene, etc., bind to the provided nucleic acid sequences (SEQ ID NOS: 1-999) under stringent hybridization conditions. By using probes, particularly labeled probes of DNA sequences, one can isolate homologous or related genes. The source of homologous genes can be any species, particularly grasses as previously described.

[0026] Preferably, hybridization is performed using at least 15 contiguous nucleotides of at least one of SEQ ID NOS: 1-999. The probe will preferentially hybridize with a nucleic acid or mRNA comprising the complementary sequence, allowing the identification and retrieval of the nucleic acids of the biological material that uniquely hybridize to the selected probe. Probes of more than 15 nucleotides can be used, e.g. probes of from about 18 nucleotides up to the entire length of the provided nucleic acid sequences, but 15 nucleotides generally represents sufficient sequence for unique identification.

[0027] The nucleic acids of the invention also include naturally occurring variants of the nucleotide sequences, e.g. degenerate variants, allelic variants, etc. Variants of the nucleic acids of the invention are identified by hybridization of putative variants with nucleotide sequences disclosed herein, preferably by hybridization under stringent conditions For example, by using appropriate wash conditions, variants of the nucleic acids of the invention can be identified where the allelic variant exhibits at most about 25-30% base pair mismatches relative to the selected nucleic acid probe. In general, allelic variants contain 5-25% base pair mismatches, and can contain as little as even 2-5%, or 1-2% base pair mismatches, as well as a single base-pair mismatch.

[0028] The invention also encompasses homologs corresponding to the nucleic acids of SEQ ID NOS: 1-999, where the source of homologous genes can be any related species, usually within the same genus or group. Homologs have substantial sequence similarity, e.g. at least 75% sequence identity, usually at least 90%, more usually at least 95% between nucleotide sequences. Sequence similarity is calculated based on a reference sequence, which may be a subset of a larger sequence, such as a conserved motif, coding region, flanking region, etc. A reference sequence will usually be at least about 18 contiguous nt long, more usually at least about 30 nt long, and may extend to the complete sequence that is being compared. Algorithms for sequence analysis are known in the art, such as BLAST, described in Altschul et al., J. Mol. Biol. (1990) 215:403-10.

[0029] In general, variants of the invention have a sequence identity greater than at least about 65%, preferably at least about 75%, more preferably at least about 85%, and can be greater than at least about 90% or more as determined by the Smith-Waterman homology search algorithm as implemented in MPSRCH program (Oxford Molecular). For the purposes of this invention, a preferred method of calculating percent identity is the Smith-Waterman algorithm, using the following. Global DNA sequence identity must be greater than 65% as determined by the Smith-Wateman homology search algorithm as implemented in MPSRCH program (Oxford Molecular) using an affine gap search with the following search parameters: gap open penalty, 12; and gap extention penalty, 1.

[0030] The subject nucleic acids can be cDNAs or genomic DNAs, as well as fragments thereof, particularly fragments that encode a biologically active gene product and/or are useful in the methods disclosed herein. The term “cDNA” as used herein is intended to include all nucleic acids that share the arrangement of sequence elements found in native mature mRNA species, where sequence elements are exons and 3′ and 5′ non-coding regions. Normally mRNA species have contiguous exons, with the introns, when present, being removed by nuclear RNA splicing, to create a continuous open reading frame encoding a polypeptide of the invention.

[0031] A genomic sequence of interest comprises the nucleic acid present between the initiation codon and the stop codon, as defined in the listed sequences, including all of the introns that are normally present in a native chromosome. It can further include the 3′ and 5′ untranslated regions found in the mature mRNA. It can further include specific transcriptional and translational regulatory sequences, such as promoters, enhancers, etc., including about 1 kb, but possibly more, of flanking genomic DNA at either the 5′ and 3′ end of the transcribed region. The genomic DNA can be isolated as a fragment of 100 kb or smaller; and substantially free of flanking chromosomal sequence. The genomic DNA flanking the coding region, either 3′ and 5′, or internal regulatory sequences as sometimes found in introns, contains sequences required for expression.

[0032] The nucleic acid compositions of the subject invention can encode all or a part of the subject expressed polypeptides. Double or single stranded fragments can be obtained from the DNA sequence by chemically synthesizing oligonucleotides in accordance with conventional methods, by restriction enzyme digestion, by PCR amplification, etc. Isolated nucleic acids and nucleic acid fragments of the invention comprise at least about 15 up to about 100 contiguous nucleotides, or up to the complete sequence provided in SEQ ID NOS: 1-999. For the most part, fragments will be of at least 15 nt, usually at least 18 nt or 25 nt, and up to at least about 50 contiguous nt in length or more.

[0033] Probes specific to the nucleic acids of the invention can be generated using the nucleic acid sequences disclosed in SEQ ID NOS: 1-999 and the fragments as described above. The probes can be synthesized chemically or can be generated from longer nucleic acids using restriction enzymes. The probes can be labeled, for example, with a radioactive, biotinylated, or fluorescent tag. Preferably, probes are designed based upon an identifying sequence of a nucleic acid of one of SEQ ID NOS: 1-999. More preferably, probes are designed based on a contiguous sequence of one of the subject nucleic acids that remain unmasked following application of a masking program for masking low complexity (e.g., XBLAST) to the sequence., i.e. one would select an unmasked region, as indicated by the nucleic acids outside the poly-n stretches of the masked sequence produced by the masking program.

[0034] The nucleic acids of the subject invention are isolated and obtained in substantial purity, generally as other than an intact chromosome. Usually, the nucleic acids, either as DNA or RNA, will be obtained substantially free of other naturally-occurring nucleic acid sequences, generally being at least about 50%, usually at least about 90% pure and are typically “recombinant”, e.g., flanked by one or more nucleotides with which it is not normally associated on a naturally occurring chromosome.

[0035] The nucleic acids of the invention can be provided as a linear molecule or within a circular molecule. They can be provided within autonomously replicating molecules (vectors) or within molecules without replication sequences. They can be regulated by their own or by other regulatory sequences, as is known in the art. The nucleic acids of the invention can be introduced into suitable host cells using a variety of techniques which are available in the art, such as transferrin polycation-mediated DNA transfer, transfection with naked or encapsulated nucleic acids, liposome-mediated DNA transfer, intracellular transportation of DNA-coated latex beads, protoplast fusion, viral infection, electroporation, gene gun, calcium phosphate-mediated transfection, and the like.

[0036] The subject nucleic acid compositions can be used to, for example, produce polypeptides, as probes for the detection of mRNA of the invention in biological samples, e.g. extracts of cells, to generate additional copies of the nucleic acids, to generate ribozymes or antisense oligonucleotides, and as single stranded DNA probes or as triple-strand forming oligonucleotides. The probes described herein can be used to, for example, determine the presence or absence of the nucleic acid sequences as shown in SEQ ID NOS: 1-999 or variants thereof in a sample. These and other uses are described in more detail below.

### Use of Nucleic Acids as Coding Sequences

[0037] Naturally occurring Arabidopsis polypeptides or fragments thereof are encoded by the provided nucleic acids. Methods are known in the art to determine whether the complete native protein is encoded by a candidate nucleic acid sequence. Where the provided sequence encodes a fragment of a polypeptide, methods known in the art may be used to determine the remaining sequence. These approaches may utilize a bioinformatics approach, a cloning approach, extension of mRNA species, etc.

[0038] Substantial genomic sequence is available for Arabidopsis, and may be exploited for determining the complete coding sequence corresponding to the provided sequences. The region of the chromosome to which a given sequence is located may be determined by hybridization or by database searching. The genomic sequence is then searched upstream and downstream for the presence of intron/exon boundaries, and for motifs characteristic of transcriptional start and stop sequences, for example by using Genscan (Burge and Karlin (1997) J. Mol. Biol. 268:78-94); or GRAIL (Uberbacher and Mural (1991) P.N.A.S. 88:11261-1265).

[0039] Alternatively, nucleic acid having a sequence of one of SEQ ID NOS: 1-999, or an identifying fragment thereof, is used as a hybridization probe to complementary molecules in a cDNA library using probe design methods, cloning methods, and clone selection techniques as known in the art. Libraries of cDNA are made from selected cells. The cells may be those of A. thaliana, or of related species. In some cases it will be desirable to select cells from a particular stage, e.g. seeds, leaves, infected cells, etc.

[0040] Techniques for producing and probing nucleic acid sequence libraries are described, for example, in Sambrook et al., Molecular Cloning: A Laboratory Manual, 2^{nd} Ed., (1989) Cold Spring Harbor Press, Cold Spring Harbor, N.Y.; and Current Protocols in Molecular Biology, (1987 and updates) Ausubel et al., eds. The cDNA can be prepared by using primers based on sequence from SEQ ID NOS: 1-999. In one embodiment, the cDNA library can be made from only poly-adenylated mRNA. Thus, poly-T primers can be used to prepare cDNA from the mRNA.

[0041] Members of the library that are larger than the provided nucleic acids, and preferably that encompass the complete coding sequence of the native message, are obtained. In order to confirm that the entire cDNA has been obtained, RNA protection experiments are performed as follows. Hybridization of a full-length cDNA to an mRNA will protect the RNA from RNase degradation. If the cDNA is not full length, then the portions of the mRNA that are not hybridized will be subject to RNase degradation. This is assayed, as is known in the art, by changes in electrophoretic mobility on polyacrylamide gels, or by detection of released monoribonucleotides. Sambrook et al., Molecular Cloning: A Laboratory Manual, 2^{nd} Ed., (1989) Cold Spring Harbor Press, Cold Spring Harbor, N.Y. In order to obtain additional sequences 5′ to the end of a partial cDNA, 5′RACE (PCR Protocols: A Guide to Methods and Applications, (1990) Academic Press, Inc.) may be performed.

[0042] Genomic DNA is isolated using the provided nucleic acids in a manner similar to the isolation of full-length cDNAs. Briefly, the provided nucleic acids, or portions thereof, are used as probes to libraries of genomic DNA. Preferably, the library is obtained from the cell type that was used to generate the nucleic acids of the invention, but this is not essential. Such libraries can be in vectors suitable for carrying large segments of a genome, such as P1 or YAC, as described in detail in Sambrook et al., 9.4-9.30. In order to obtain additional 5′ or 3′ sequences, chromosome walking is performed, as described in Sambrook et al., such that adjacent and overlapping fragments of genomic DNA are isolated. These are mapped and pieced together, as is known in the art, using restriction digestion enzymes and DNA ligase.

[0043] PCR methods may be used to amplify the members of a cDNA library that comprise the desired insert. In this case, the desired insert will contain sequence from the full length cDNA that corresponds to the instant nucleic acids. Such PCR methods include gene trapping and RACE methods. Gene trapping entails inserting a member of a cDNA library into a vector. The vector then is denatured to produce single stranded molecules. Next, a substrate-bound probe, such a biotinylated oligo, is used to trap cDNA inserts of interest. Biotinylated probes can be linked to an avidin-bound solid substrate. PCR methods can be used to amplify the trapped cDNA. To trap sequences corresponding to the full length genes, the labeled probe sequence is based on the nucleic acid sequences of the invention. Random primers or primers specific to the library vector can be used to amplify the trapped cDNA. Such gene trapping techniques are described in Gruber et al., WO 95/04745 and Gruber et al., U.S. Pat. No. 5,500,356. Kits are commercially available to perform gene trapping experiments from, for example, Life Technologies, Gaithersburg, Md., USA.

[0044] “Rapid amplification of cDNA ends”, or RACE, is a PCR method of amplifying cDNAs from a number of different RNAs. The cDNAs are ligated to an oligonucleotide linker, and amplified by PCR using two primers. One primer is based on sequence from the instant nucleic acids, for which full length sequence is desired, and a second primer comprises sequence that hybridizes to the oligonucleotide linker to amplify the cDNA. A description of this methods is reported in WO 97/19110. A common primer may be designed to anneal to an arbitrary adaptor sequence ligated to cDNA ends. When a single gene-specific RACE primer is paired with the common primer, preferential amplification of sequences between the single gene specific primer and the common primer occurs. Commercial cDNA pools modified for use in RACE are available.

[0045] Once the full-length cDNA or gene is obtained, DNA encoding variants can be prepared by site-directed mutagenesis, described in detail in Sambrook et al., 15.3-15.63. The choice of codon or nucleotide to be replaced can be based on disclosure herein on optional changes in amino acids to achieve altered protein structure and/or function. As an alternative method to obtaining DNA or RNA from a biological material, nucleic acid comprising nucleotides having the sequence of one or more nucleic acids of the invention can be synthesized.

### Expression of Polypeptides

[0046] The provided nucleic acid, e.g. a nucleic acid having a sequence of one of SEQ ID NOS: 1-999), the corresponding cDNA, the polypeptide coding sequence as described above, or the full-length gene is used to express a partial or complete gene product. Constructs of nucleic acids having sequences of SEQ ID NOS: 1-999 can be generated by recombinant methods, synthetically, or in a single-step assembly of a gene and entire plasmid from large numbers of oligodeoxyribonucleotides is described by, e.g. Stemmer et al., Gene (Amsterdam) (1995) 164(1):49-53.

[0047] Appropriate nucleic acid constructs are purified using standard recombinant DNA techniques as described in, for example, Sambrook et al., Molecular Cloning: A Laboratory Manual, 2^{nd} Ed., (1989) Cold Spring Harbor Press, Cold Spring Harbor, N.Y. The gene product encoded by a nucleic acid of the invention is expressed in any expression system, including, for example, bacterial, yeast, insect, amphibian and mammalian systems.

[0048] The subject nucleic acid molecules are generally propagated by placing the molecule in a vector. Viral and non-viral vectors are used, including plasmids. The choice of plasmid will depend on the type of cell in which propagation is desired and the purpose of propagation. Certain vectors are useful for amplifying and making large amounts of the desired DNA sequence. Other vectors are suitable for expression in cells in culture. Still other vectors are suitable for transfer and expression in cells in a whole organism or person. The choice of appropriate vector is well within the skill of the art. Many such vectors are available commercially.

[0049] The nucleic acids set forth in SEQ ID NOS: 1-999 or their corresponding full-length nucleic acids are linked to regulatory sequences as appropriate to obtain the desired expression properties. These can include promoters attached either at the 5′ end of the sense strand or at the 3′ end of the antisense strand, enhancers, terminators, operators, repressors, and inducers. The promoters can be regulated or constitutive. In some situations it may be desirable to use conditionally active promoters, such as tissue-specific or developmental stage-specific promoters. These are linked to the desired nucleotide sequence using the techniques described above for linkage to vectors. Any techniques known in the art can be used.

[0050] When any of the above host cells, or other appropriate host cells or organisms, are used to replicate and/or express the nucleic acids or nucleic acids of the invention, the resulting replicated nucleic acid, RNA, expressed protein or polypeptide, is within the scope of the invention as a product of the host cell or organism. The product is recovered by any appropriate means known in the art.

### Identification of Functional and Structural Motifs

[0051] Translations of the nucleotide sequence of the provided nucleic acids, cDNAs or full genes can be aligned with individual known sequences. Similarity with individual sequences can be used to determine the activity of the polypeptides encoded by the nucleic acids of the invention. Also, sequences exhibiting similarity with more than one individual sequence can exhibit activities that are characteristic of either or both individual sequences.

[0052] The six possible reading frames may be translated using programs such as GCG pepdata, or GCG Frames (Wisconsin Package Version 10.0, Genetics Computer Group (GCG) , Madison, Wis., USA. ). Programs such as ORFFinder (National Center for Biotechnology Information (NCBI) a division of the National Library of Medicine (NLM) at the National Institutes of Health (NIH) http://www.ncbi.nlm.nih.gov/) may be used to identify open reading frames (ORFs) in sequences. ORF finder identifies all possible ORFs in a DNA sequence by locating the standard and alternative stop and start codons. Other ORF identification programs include Genie (Kulp et al. (1996).

[0053] A generalized Hidden Markov Model may be used for the recognition of genes in DNA. (ISMB-96, St. Louis, Mo., AAAI/MIT Press; Reese et al. (1997), “Improved splice site detection in Genie”. Proceedings of the First Annual International Conference on Computational Molecular Biology RECOMB 1997, Santa Fe, N. Mex., ACM Press, New York., P. 34.); BESTORF—Prediction of potential coding fragment in human or plant EST/mRNA sequence data using Markov Chain Models; and FGENEP—Multiple genes structure prediction in plant genomic DNA (Solovyev et al. (1995) Identification of human gene structure using linear discriminant functions and dynamic programming. In Proceedings of the Third International Conference on Intelligent Systems for Molecular Biology eds. Rawling et al. Cambridge, England, AAAI Press,367-375.; Solovyev et al. (1994) Nucl. Acids Res. 22(24):5156-5163; Solovyev et al,. The prediction of human exons by oligonucleotide composition and discriminant analysis of spliceable open reading frames, in: The Second International conference on Intelligent systems for Molecular Biology (eds. Altman et al.), AAAI Press, Menlo Park, Calif. (1994, 354-362) Solovyev and Lawrence, Prediction of human gene structure using dynamic programming and oligonucleotide composition, In: Abstracts of the 4th annual Keck symposium. Pittsburgh, 47,1993; Burge and Karlin (1997) J. Mol. Biol. 268:78-94; Kulp et al. (1996) Proc. Conf. on Intelligent Systems in Molecular Biology '96, 134-142).

[0054] The full length sequences and fragments of the nucleic acid sequences of the nearest neighbors can be used as probes and primers to identify and isolate the full length sequence corresponding to provided nucleic acids. Typically, a selected nucleic acid is translated in all six frames to determine the best alignment with the individual sequences. These amino acid sequences are referred to, generally, as query sequences, which are aligned with the individual sequences. Suitable databases include Genbank, EMBL, and DNA Database of Japan (DDBJ).

[0055] Query and individual sequences can be aligned using the methods and computer programs described above, and include BLAST, available by ftp at ftp://ncbi.nlm.nih.gov/.

[0056] Gapped BLAST and PSI-BLAST are useful search tools provided by NCBI. (version 2.0) (Altschul et al., 1997). Position-Specific Iterated BLAST (PSI-BLAST) provides an automated, easy-to-use version of a “profile” search, which is a sensitive way to look for sequence homologues. The program first performs a gapped BLAST database search. The PSI-BLAST program uses the information from any significant alignments returned to construct a position-specific score matrix, which replaces the query sequence for the next round of database searching. PSI-BLAST may be iterated until no new significant alignments are found. The Gapped BLAST algorithm allows gaps (deletions and insertions) to be introduced into the alignments that are returned. Allowing gaps means that similar regions are not broken into several segments. The scoring of these gapped alignments tends to reflect biological relationships more closely. The Smith-Waterman is another algorithm that produces local or global gapped sequence alignments, see Meth. Mol. Biol. (1997) 70: 173-187. Also, the GAP program using the Needleman and Wunsch global alignment method can be utilized for sequence alignments.

[0057] Results of individual and query sequence alignments can be divided into three categories, high similarity, weak similarity, and no similarity. Individual alignment results ranging from high similarity to weak similarity provide a basis for determining polypeptide activity and/or structure. Parameters for categorizing individual results include: percentage of the alignment region length where the strongest alignment is found, percent sequence identity, and e value.

[0058] The percentage of the alignment region length is calculated by counting the number of residues of the individual sequence found in the region of strongest alignment, e.g. contiguous region of the individual sequence that contains the greatest number of residues that are identical to the residues of the corresponding region of the aligned query sequence. This number is divided by the total residue length of the query sequence to calculate a percentage. For example, a query sequence of 20 amino acid residues might be aligned with a 20 amino acid region of an individual sequence. The individual sequence might be identical to amino acid residues 5, 9-15, and 17-19 of the query sequence. The region of strongest alignment is thus the region stretching from residue 9-19, an 11 amino acid stretch. The percentage of the alignment region length is: 11 (length of the region of strongest alignment) divided by (query sequence length) 20 or 55%.

[0059] Percent sequence identity is calculated by counting the number of amino acid matches between the query and individual sequence and dividing total number of matches by the number of residues of the individual sequences found in the region of strongest alignment. Thus, the percent identity in the example above would be 10 matches divided by 11 amino acids, or approximately, 90.9%

[0060] E value is the probability that the alignment was produced by chance. For a single alignment, the e value can be calculated according to Karlin et al., Proc. Natl. Acad. Sci. (1990) 87:2264 and Karlin et al., Proc. Natl. Acad. Sci. (1993) 90. The e value of multiple alignments using the same query sequence can be calculated using an heuristic approach described in Altschul et al., Nat. Genet. (1994) 6:119. Alignment programs such as BLAST program can calculate the e value.

[0061] Another factor to consider for determining identity or similarity is the location of the similarity or identity. Strong local alignment can indicate similarity even if the length of alignment is short. Sequence identity scattered throughout the length of the query sequence also can indicate a similarity between the query and profile sequences. The boundaries of the region where the sequences align can be determined according to Dooliftle, supra; BLAST or FASTA programs; or by determining the area where sequence identity is highest.

[0062] In general, in alignment results considered to be of high similarity, the percent of the alignment region length is typically at least about 55% of total length query sequence; more typically, at least about 58%; even more typically; at least about 60% of the total residue length of the query sequence. Usually, percent length of the alignment region can be as much as about 62%; more usually, as much as about 64%; even more usually, as much as about 66%. Further, for high similarity, the region of alignment, typically, exhibits at least about 75% of sequence identity; more typically, at least about 78%; even more typically; at least about 80% sequence identity. Usually, percent sequence identity can be as much as about 82%; more usually, as much as about 84%; even more usually, as much as about 86%.

[0063] The p value is used in conjunction with these methods. The query sequence is considered to have a high similarity with a profile sequence when the p value is less than or equal to 10⁻². Confidence in the degree of similarity between the query sequence and the profile sequence increases as the p value become smaller.

[0064] In general, where alignment results considered to be of weak similarity, there is no minimum percent length of the alignment region nor minimum length of alignment. A better showing of weak similarity is considered when the region of alignment is, typically, at least about 15 amino acid residues in length; more typically, at least about 20; even more typically; at least about 25 amino acid residues in length. Usually, length of the alignment region can be as much as about 30 amino acid residues; more usually, as much as about 40; even more usually, as much as about 60 amino acid residues. Further, for weak similarity, the region of alignment, typically, exhibits at least about 35% of sequence identity; more typically, at least about 40%; even more typically; at least about 45% sequence identity. Usually, percent sequence identity can be as much as about 50%; more usually, as much as about 55%; even more usually, as much as about 60%.

[0065] The query sequence is considered to have a low similarity with a profile sequence when the p value is greater than 10⁻². Confidence in the degree of similarity between the query sequence and the profile sequence decreases as the p values become larger.

[0066] Sequence identity alone can be used to determine similarity of a query sequence to an individual sequence and can indicate the activity of the sequence. Such an alignment, preferably, permits gaps to align sequences. Typically, the query sequence is related to the profile sequence if the sequence identity over the entire query sequence is at least about 15%; more typically, at least about 20%; even more typically, at least about 25%; even more typically, at least about 50%. Sequence identity alone as a measure of similarity is most useful when the query sequence is usually, at least 80 residues in length; more usually, 90 residues; even more usually, at least 95 amino acid residues in length. More typically, similarity can be concluded based on sequence identity alone when the query sequence is preferably 100 residues in length; more preferably, 120 residues in length; even more preferably, 150 amino acid residues in length.

[0067] It is apparent, when studying protein sequence families, that some regions have been better conserved than others during evolution. These regions are generally important for the function of a protein and/or for the maintenance of its three-dimensional structure. By analyzing the constant and variable properties of such groups of similar sequences, it is possible to derive a signature for a protein family or domain, which distinguishes its members from all other unrelated proteins. A pertinent analogy is the use of fingerprints by the police for identification purposes. A fingerprint is generally sufficient to identify a given individual. Similarly, a protein signature can be used to assign a new sequence to a specific family of proteins and thus to formulate hypotheses about its function. The PROSITE database is a compendium of such fingerprints (motifs) and may be used with search software such as Wisconsin GCG Motifs to find motifs or fingerprints in query sequences. PROSITE currently contains signatures specific for about a thousand protein families or domains. Each of these signatures comes with documentation providing background information on the structure and function of these proteins (Hofmann et al. (1999) Nucleic Acids Res. 27:215-219; Bucher and Bairoch ., A generalized profile syntax for biomolecular sequences motifs and its function in automatic sequence interpretation (In) ISMB-94; Proceedings 2nd International Conference on Intelligent Systems for Molecular Biology; Altman et al. Eds. (1994), pp 53-61, AAAI Press, Menlo Park).

[0068] Translations of the provided nucleic acids can be aligned with amino acid profiles that define either protein families or common motifs. Also, translations of the provided nucleic acids can be aligned to multiple sequence alignments (MSA) comprising the polypeptide sequences of members of protein families or motifs. Similarity or identity with profile sequences or MSAs can be used to determine the activity of the gene products (e.g., polypeptides) encoded by the provided nucleic acids or corresponding cDNA or genes.

[0069] Profiles can designed manually by (1) creating an MSA, which is an alignment of the amino acid sequence of members that belong to the family and (2) constructing a statistical representation of the alignment. Such methods are described, for example, in Birney et al., Nucl. Acid Res. (1996) 24(14): 2730-2739. MSAs of some protein families and motifs are available for downloading to a local server. For example, the PFAM database with MSAs of 547 different families and motifs, and the software (HMMER) to search the PFAM database may be downloaded from ftp://ftp.genetics.wustl.edu/pub/eddy/pfam-4.4/ to allow secure searches on a local server. Pfam is a database of multiple alignments of protein domains or conserved protein regions., which represent evolutionary conserved structure that has implications for the protein's function (Sonnhammer et al. (1998) Nucl. Acid Res. 26:320-322; Bateman et al. (1999) Nucleic Acids Res. 27:260-262).

[0070] The 3D_ali databank (Pasarella, S. and Argos, P. (1992) Prot. Engineering 5:121-137) was constructed to incorporate new protein structural and sequence data. The databank has proved useful in many research fields such as protein sequence and structure analysis and comparison, protein folding, engineering and design and evolution. The collection enhances present protein structural knowledge by merging information from proteins of similar main-chain fold with homologous primary structures taken from large databases of all known sequences. 3D_ali databank files may be downloaded to a secure local server from http://www.embl-heidelberg.de/argos/ali/ali_form.html.

[0071] The identify and function of the gene that correlates to a nucleic acid described herein can be determined by screening the nucleic acids or their corresponding amino acid sequences against profiles of protein families. Such profiles focus on common structural motifs among proteins of each family. Publicly available profiles are known in the art.

[0072] In comparing a novel nucleic acid with known sequences, several alignment tools are available. Examples include PileUp, which creates a multiple sequence alignment, and is described in Feng et al., J. Mol. Evol. (1987) 25:351. Another method, GAP, uses the alignment method of Needleman et al., J. Mol. Biol. (1970) 48:443. GAP is best suited for global alignment of sequences. A third method, BestFit, functions by inserting gaps to maximize the number of matches using the local homology algorithm of Smith et al. (1981) Adv. Appl. Math. 2:482.

### Identification of Secreted & Membrane-Bound Polypeptides

[0073] Secreted and membrane-bound polypeptides of the present invention are of interest. Because both secreted and membrane-bound polypeptides comprise a fragment of contiguous hydrophobic amino acids, hydrophobicity predicting algorithms can be used to identify such polypeptides. A signal sequence is usually encoded by both secreted and membrane-bound polypeptide genes to direct a polypeptide to the surface of the cell. The signal sequence usually comprises a stretch of hydrophobic residues. Such signal sequences can fold into helical structures. Membrane-bound polypeptides typically comprise at least one transmembrane region that possesses a stretch of hydrophobic amino acids that can transverse the membrane. Some transmembrane regions also exhibit a helical structure. Hydrophobic fragments within a polypeptide can be identified by using computer algorithms. Such algorithms include Hopp & Woods, Proc. Natl. Acad. Sci. USA (1981) 78:3824-3828; Kyte & Doolittle, J. Mol. Biol. (1982) 157:105-132; and RAOAR algorithm, Degli Esposti et al., Eur. J. Biochem. (1990) 190:207-219.

[0074] Another method of identifying secreted and membrane-bound polypeptides is to translate the nucleic acids of the invention in all six frames and determine if at least 8 contiguous hydrophobic amino acids are present. Those translated polypeptides with at least 8; more typically, 10; even more typically, 12 contiguous hydrophobic amino acids are considered to be either a putative secreted or membrane bound polypeptide. Hydrophobic amino acids include alanine, glycine, histidine, isoleucine, leucine, lysine, methionine, phenylalanine, proline, threonine, tryptophan, tyrosine, and valine.

### Identification of the Function of an Expression Product

[0075] The biological function of the encoded gene product of the invention may be determined by empirical or deductive methods. One promising avenue, termed phylogenomics, exploits the use of evolutionary information to facilitate assignment of gene function. The approach is based on the idea that functional predictions can be greatly improved by focusing on how genes became similar in sequence during evolution instead of focusing on the sequence similarity itself. One of the major efficiencies that has emerged from plant genome research to date is that a large percentage of higher plant genes can be assigned some degree of function by comparing them with the sequences of genes of known function.

[0076] Alternatively, “reverse genetics” is used to identify gene function. Large collections of insertion mutants are available for Arabidopsis, maize, petunia, and snapdragon. These collections can be screened for an insertional inactivation of any gene by using the polymerase chain reaction (PCR) primed with oligonucleotides based on the sequences of the target gene and the insertional mutagen. The presence of an insertion in the target gene is indicated by the presence of a PCR product. By multiplexing DNA samples, hundreds of thousands of lines can be screened and the corresponding mutant plants can be identified with relatively small effort. Analysis of the phenotype and other properties of the corresponding mutant will provide an insight into the function of the gene.

[0077] In one method of the invention, the gene function in a transgenic Arabidopsis plant is assessed with anti-sense constructs. A high degree of gene duplication is apparent in Arabidopsis, and many of the gene duplications in Arabidopsis are very tightly linked. Large numbers of transgenic Arabidopsis plants can be generated by infecting flowers with Agrobacterium tumefaciens containing an insertional mutagen, a method of gene silencing based on producing double-stranded RNA from bidirectional transcription of genes in transgenic plants can be broadly useful for high-throughput gene inactivation (Clough and Bent (1999) Plant J. 17; Waterhouse et al. (1998) Proc. Natl. Acad. Sci. U.S.A. 95:13959). This method may use promoters that are expressed in only a few cell types or at a particular developmental stage or in response to an external stimulus. This could significantly obviate problems associated with the lethality of some mutations.

[0078] Virus-induced gene silencing may also find use for suppressing gene function. This method exploits the fact that some or all plants have a surveillance system that can specifically recognize viral nucleic acids and mount a sequence-specific suppression of viral RNA accumulation. By inoculating plants with a recombinant virus containing part of a plant gene, it is possible to rapidly silence the endogenous plant gene.

[0079] Antisense nucleic acids are designed to specifically bind to RNA, resulting in the formation of RNA-DNA or RNA-RNA hybrids, with an arrest of DNA replication, reverse transcription or messenger RNA translation. Antisense nucleic acids based on a selected nucleic acid sequence can interfere with expression of the corresponding gene. Antisense nucleic acids are typically generated within the cell by expression from antisense constructs that contain the antisense strand as the transcribed strand. Antisense nucleic acids based on the disclosed nucleic acids will bind and/or interfere with the translation of mRNA comprising a sequence complementary to the antisense nucleic acid. The expression products of control cells and cells treated with the antisense construct are compared to detect the protein product of the gene corresponding to the nucleic acid upon which the antisense construct is based. The protein is isolated and identified using routine biochemical methods.

[0080] As an alternative method for identifying function of the gene corresponding to a nucleic acid disclosed herein, dominant negative mutations are readily generated for corresponding proteins that are active as homomultimers. A mutant polypeptide will interact with wild-type polypeptides (made from the other allele) and form a non-functional multimer. Thus, a mutation is in a substrate-binding domain, a catalytic domain, or a cellular localization domain. Preferably, the mutant polypeptide will be overproduced. Point mutations are made that have such an effect. In addition, fusion of different polypeptides of various lengths to the terminus of a protein can yield dominant negative mutants. General strategies are available for making dominant negative mutants (see for example, Herskowitz (1987) Nature 329:219). Such techniques can be used to create loss of function mutations, which are useful for determining protein function.

[0081] Another approach for discovering the function of genes utilizes gene chips and microarrays. DNA sequences representing all the genes in an organism can be placed on miniature solid supports and used as hybridization substrates to quantitate the expression of all the genes represented in a complex mRNA sample. This information is used to provide extensive databases of quantitative information about the degree to which each gene responds to pathogens, pests, drought, cold, salt, photoperiod, and other environmental variation. Similarly, one obtains extensive information about which genes respond to changes in developmental processes such as germination and flowering. One can therefore determine which genes respond to the phytohormones, growth regulators, safeners, herbicides, and related agrichemicals. These databases of gene expression information provide insights into the “pathways” of genes that control complex responses. The accumulation of DNA microarray or gene chip data from many different experiments creates a powerful opportunity to assign functional information to genes of otherwise unknown function. The conceptual basis of the approach is that genes that contribute to the same biological process will exhibit similar patterns of expression. Thus, by clustering genes based on the similarity of their relative levels of expression in response to diverse stimuli or developmental or environmental conditions, it is possible to assign functions to many genes based on the known function of other genes in the cluster.

### Construction of Polypeptides of the Invention and Variants Thereof

[0082] The polypeptides of the invention include those encoded by the disclosed nucleic acids. These polypeptides can also be encoded by nucleic acids that, by virtue of the degeneracy of the genetic code, are not identical in sequence to the disclosed nucleic acids. Thus, the invention includes within its scope a polypeptide encoded by a nucleic acid having the sequence of any one of SEQ ID NOS: 1-999 or a variant thereof.

[0083] In general, the term “polypeptide” as used herein refers to both the full length polypeptide encoded by the recited nucleic acid, the polypeptide encoded by the gene represented by the recited nucleic acid, as well as portions or fragments thereof. “Polypeptides” also includes variants of the naturally occurring proteins, where such variants are homologous or substantially similar to the naturally occurring protein, and can be of an origin of the same or different species as the naturally occurring protein. In general, variant polypeptides have a sequence that has at least about 80%, usually at least about 90%, and more usually at least about 98% sequence identity with a differentially expressed polypeptide of the invention, as measured by BLAST using the parameters described above. The variant polypeptides can be naturally or non-naturally glycosylated, i.e., the polypeptide has a glycosylation pattern that differs from the glycosylation pattern found in the corresponding naturally occurring protein.

[0084] In general, the polypeptides of the subject invention are provided in a non-naturally occurring environment, e.g. are separated from their naturally occurring environment. In certain embodiments, the subject protein is present in a composition that is enriched for the protein as compared to a control. As such, purified polypeptide is provided, where by purified is meant that the protein is present in a composition that is substantially free of non-differentially expressed polypeptides, where by substantially free is meant that less than 90%, usually less than 60% and more usually less than 50% of the composition is made up of non-differentially expressed polypeptides.

[0085] Also within the scope of the invention are variants; variants of polypeptides include mutants, fragments, and fusions. Mutants can include amino acid substitutions, additions or deletions. The amino acid substitutions can be conservative amino acid substitutions or substitutions to eliminate non-essential amino acids, such as to alter a glycosylation site, a phosphorylation site or an acetylation site, or to minimize misfolding by substitution or deletion of one or more cysteine residues that are not necessary for function. Conservative amino acid substitutions are those that preserve the general charge, hydrophobicity/hydrophilicity, and/or steric bulk of the amino acid substituted.

[0086] Variants also include fragments of the polypeptides disclosed herein, particularly biologically active fragments and/or fragments corresponding to functional domains. Fragments of interest will typically be at least about 10 amino acids (aa) to at least about 15 aa in length, usually at least about 50 aa in length, and can be as long as 300 aa in length or longer, but will usually not exceed about 1000 aa in length, where the fragment will have a stretch of amino acids that is identical to a polypeptide encoded by a nucleic acid having a sequence of any SEQ ID NOS: 1-999, or a homolog thereof.

[0087] The protein variants described herein are encoded by nucleic acids that are within the scope of the invention. The genetic code can be used to select the appropriate codons to construct the corresponding variants.

### Libraries and Arrays

[0088] In general, a library of biopolymers is a collection of sequence information, which information is provided in either biochemical form (e.g., as a collection of nucleic acid or polypeptide molecules), or in electronic form (e.g., as a collection of genetic sequences stored in a computer-readable form, as in a computer system and/or as part of a computer program). The term biopolymer, as used herein, is intended to refer to polypeptides, nucleic acids, and derivatives thereof, which molecules are characterized by the possession of genetic sequences either corresponding to, or encoded by, the sequences set forth in the provided sequence list (seqlist). The sequence information can be used in a variety of ways, e.g., as a resource for gene discovery, as a representation of sequences expressed in a selected cell type, e.g. cell type markers, etc.

[0089] The nucleic acid libraries of the subject invention include sequence information of a plurality of nucleic acid sequences, where at least one of the nucleic acids has a sequence of any of SEQ ID NOS: 1-999. By plurality is meant one or more, usually at least 2 and can include up to all of SEQ ID NOS: 1-999. The length and number of nucleic acids in the library will vary with the nature of the library, e.g., if the library is an oligonucleotide array, a cDNA array, a computer database of the sequence information, etc.

[0090] Where the library is an electronic library, the nucleic acid sequence information can be present in a variety of media. “Media” refers to a manufacture, other than an isolated nucleic acid molecule, that contains the sequence information of the present invention. Such a manufacture provides the sequences or a subset thereof in a form that can be examined by means not directly applicable to the sequence as it exists in a nucleic acid. For example, the nucleotide sequence of the present invention, e.g. the nucleic acid sequences of any of the nucleic acids of SEQ ID NOS: 1-999, can be recorded on computer readable media, e.g. any medium that can be read and accessed directly by a computer. Such media include, but are not limited to: magnetic storage media, such as a floppy disc, a hard disc storage medium, and a magnetic tape; optical storage media such as CD-ROM; electrical storage media such as RAM and ROM; and hybrids of these categories such as magnetic/optical storage media. One of skill in the art can readily appreciate how any of the presently known computer readable mediums can be used to create a manufacture comprising a recording of the present sequence information. “Recorded” refers to a process for storing information on computer readable medium, using any such methods as known in the art. Any convenient data storage structure can be chosen, based on the means used to access the stored information. A variety of data processor programs and formats can be used for storage, e.g. word processing text file, database format, etc. In addition to the sequence information, electronic versions of the libraries of the invention can be provided in conjunction or connection with other computer-readable information and/or other types of computer-readable files (e.g., searchable files, executable files, etc, including, but not limited to, for example, search program software, etc.)

[0091] By providing the nucleotide sequence in computer readable form, the information can be accessed for a variety of purposes. Computer software to access sequence information is publicly available. For example, the BLAST (Altschul et al., supra.) and BLAZE (Brutlag et al. Comp. Chem. (1993) 17:203) search algorithms on a Sybase system can be used identify open reading frames (ORFs) within the genome that contain homology to ORFs from other organisms.

[0092] As used herein, “a computer-based system” refers to the hardware means, software means, and data storage means used to analyze the nucleotide sequence information of the present invention. The minimum hardware of the computer-based systems of the present invention comprises a central processing unit (CPU), input means, output means, and data storage means. A skilled artisan can readily appreciate that any one of the currently available computer-based system are suitable for use in the present invention. The data storage means can comprise any manufacture comprising a recording of the present sequence information as described above, or a memory access means that can access such a manufacture.

[0093] “Search means” refers to one or more programs implemented on the computer-based system, to compare a target sequence or target structural motif with the stored sequence information. Search means are used to identify fragments or regions of the genome that match a particular target sequence or target motif. A variety of known algorithms are publicly known and commercially available, e.g. MacPattern (EMBL), BLASTN, BLASTX (NCBI) and tBLASTX. A “target sequence” can be any DNA or amino acid sequence of six or more nucleotides or two or more amino acids, preferably from about 10 to 100 amino acids or from about 30 to 300 nucleotide residues.

[0094] A “target structural motif,” or “target motif,” refers to any rationally selected sequence or combination of sequences in which the sequence(s) are chosen based on a three-dimensional configuration that is formed upon the folding of the target motif, or on consensus sequences of regulatory or active sites. There are a variety of target motifs known in the art. Protein target motifs include, but arc not limited to, enzyme active sites and signal sequences. Nucleic acid target motifs include, but are not limited to, hairpin structures, promoter sequences and other expression elements such as binding sites for transcription factors.

[0095] A variety of structural formats for the input and output means can be used to input and output the information in the computer-based systems of the present invention. One format for an output means ranks fragments of the genome possessing varying degrees of homology to a target sequence or target motif. Such presentation provides a skilled artisan with a ranking of sequences and identifies the degree of sequence similarity contained in the identified fragment.

[0096] A variety of comparing means can be used to compare a target sequence or target motif with the data storage means to identify sequence fragments of the genome. A skilled artisan can readily recognize that any one of the publicly available homology search programs can be used as the search means for the computer based systems of the present invention.

[0097] As discussed above, the “library” of the invention also encompasses biochemical libraries of the nucleic acids of SEQ ID NOS: 1-999, e.g., collections of nucleic acids representing the provided nucleic acids. The biochemical libraries can take a variety of forms, e.g. a solution of cDNAs, a pattern of probe nucleic acids stably bound to a surface of a solid support (microarray) and the like. By array is meant an article of manufacture that has a solid support or substrate with one or more nucleic acid targets on one of its surfaces, where the number of distinct nucleic may be in the hundreds, thousand, or tens of thousands. Each nucleic acid will comprise at 18 nt and often at least 25 nt, and often at least 100 to 1000 nucleotides, and may represent up to a complete coding sequence or cDNA.. A variety of different array formats have been developed and are known to those of skill in the art. The arrays of the subject invention find use in a variety of applications, including gene expression analysis, drug screening, mutation analysis and the like, as disclosed in the above-listed exemplary patent documents.

[0098] In addition to the above nucleic acid libraries, analogous libraries of polypeptides are also provided, where the where the polypeptides of the library will represent at least a portion of the polypeptides encoded by SEQ ID NOS: 1-999.

### Genetically Altered Cells and Transgenics

[0099] The subject nucleic acids can be used to create genetically modified and transgenic organisms, usually plant cells and plants, which may be monocots or dicots. The term transgenic, as used herein, is defined as an organism into which an exogenous nucleic acid construct has been introduced, generally the exogenous sequences are stably maintained in the genome of the organism. Of particular interest are transgenic organisms where the genomic sequence of germ line cells has been stably altered by introduction of an exogenous construct.

[0100] Typically, the transgenic organism is altered in the genetic expression of the introduced nucleotide sequences as compared to the wild-type, or unaltered organism. For example, constructs that provide for over-expression of a targeted sequence, sometimes referred to as a “knock-in”, provide for increased levels of the gene product. Alternatively, expression of the targeted sequence can be down-regulated or substantially eliminated by introduction of a “knock-out” construct, which may direct transcription of an anti-sense RNA that blocks expression of the naturally occurring mRNA, by deletion of the genomic copy of the targeted sequence, etc.

[0101] In one method, large numbers of genes are simultaneously introduced in order to explore the genetic basis of complex traits, for example by making plant artificial chromosome (PLAC) libraries. The centromeres in Arabidopsis have been mapped and current genome sequencing efforts will extend through these regions. Because Arabidopsis telomeres are very similar to those in yeast one may use a hybrid sequence of alternating plant and yeast sequences that function in both types of organisms, developing yeast artificial chromosome-PLAC libraries, and then introducing them into a suitable plant host to evaluate the phenotypic consequences. By providing a defined chromosomal environment for cloned genes, the use of PLACs may also enhance the ability to produce transgenic plants with defined levels of gene expression.

[0102] It has been found in many organisms that there is significant redundancy in the representation of genes in a genome. That is, a particular gene function is likely by represented by multiple copies of similar coding sequences in the genome. These copies are typically conserved in the amino acid sequence, but may diverge in the sequence of non-translated sequences, and in their codon usage. In order to knock out a particular genetic function in an organism, it may not be sufficient to delete a genomic copy of a single gene. In such cases it may be preferable to achieve a genetic knock-out with an anti-sense construct, particularly where the sequence is aligned with the coding portion of the mRNA.

[0103] Methods of transforming plant cells are well-known in the art, and include protoplast transformation, tungsten whiskers (Coffee et al., U.S. Pat. No. 5,302,523, issued Apr. 12, 1994), directly by microorganisms with infectious plasmids, use of transposons (U.S. Pat. No. 5,792,294), infectious viruses, the use of liposomes, microinjection by mechanical or laser beam methods, by whole chromosomes or chromosome fragments, electroporation, silicon carbide fibers, and microprojectile bombardment.

[0104] For example, one may utilize the biolistic bombardment of meristem tissue, at a very early stage of development, and the selective enhancement of transgenic sectors toward genetic homogeneity, in cell layers that contribute to germline transmission. Biolistics-mediated production of fertile, transgenic maize is described in Gordon-Kamm et al. (1990), Plant Cell 2:603; Fromm et al. (1990) Bio/Technology 8:833, for example. Alternatively, one may use a microorganism, including but not limited to, Agrobacterium tumefaciens as a vector for transforming the cells, particularly where the targeted plant is a dicotyledonous species. See, for example, U.S. Pat. No. 5,635,381. Leung et al. (1990) Curr. Genet. 17(5):409-11 describe integrative transformation of three fertile hermaphroditic strains of Arabidopsis thaliana using plasmids and cosmids that contain an E. coli gene linked to Aspergillus nidulans regulatory sequences.

[0105] Preferred expression cassettes for cereals may include promoters that are known to express exogenous DNAs in corn cells. For example, the Adhl promoter has been shown to be strongly expressed in callus tissue, root tips, and developing kernels in corn. Promoters that are used to express genes in corn include, but are not limited to, a plant promoter such as the, CaMV 35S promoter (Odell et al., Nature, 313, 810 (1985)), or others such as CaMV 19S (Lawton et al., Plant Mol. Biol., 9, 31F (1987)), nos (Ebert et al., PNAS USA, 84, 5745 (1987)), Adh (Walker et al., PNAS USA, 84, 6624 (1987)), sucrose synthase (Yang et al., PNAS USA, 87, 4144 (1990)), .alpha.-tubulin, ubiquitin, actin (Wang et al., Mol. Cell. Biol., 12, 3399 (1992)), cab (Sullivan et al., Mol. Gen. Genet, 215, 431 (1989)), PEPCase (Hudspeth et al., Plant Mol. Biol., 12, 579 (1989)), or those associated with the R gene complex (Chandler et al., The Plant Cell, 1, 1175 (1989)). Other promoters useful in the practice of the invention are known to those of skill in the art.

[0106] Tissue-specific promoters, including but not limited to, root-cell promoters (Conkling et al., Plant Physiol., 93, 1203 (1990)), and tissue-specific enhancers (Fromm et al., The Plant Cell, 1, 977 (1989)) are also contemplated to be particularly useful, as are inducible promoters such as water-stress-, ABA- and turgor-inducible promoters (Guerrero et al., Plant Molecular Biology, 15, 11-26)), and the like.

[0107] Regulating and/or limiting the expression in specific tissues may be functionally accomplished by introducing a constitutively expressed gene (all tissues) in combination with an antisense gene that is expressed only in those tissues where the gene product is not desired. Expression of an antisense transcript of this preselected DNA segment in an rice grain, using, for example, a zein promoter, would prevent accumulation of the gene product in seed. Hence the protein encoded by the preselected DNA would be present in all tissues except the kernel.

[0108] Alternatively, one may wish to obtain novel tissue-specific promoter sequences for use in accordance with the present invention. To achieve this, one may first isolate cDNA clones from the tissue concerned and identify those clones which are expressed specifically in that tissue, for example, using Northern blotting or DNA microarrays. Ideally, one would like to identify a gene that is not present in a high copy number, but which gene product is relatively abundant in specific tissues. The promoter and control elements of corresponding genomic clones may then be localized using the techniques of molecular biology known to those of skill in the art. Alternatively, promoter elements can be identified using enhancer traps based on T-DNA and/or transposon vector systems (see, for example, Campisi et al. (1999) Plant J. 17:699-707; Gu etal. (1998) Development 125:1509-1517).

[0109] In some embodiments of the present invention expression of a DNA segment in a transgenic plant will occur only in a certain time period during the development of the plant. Developmental timing is frequently correlated with tissue specific gene expression. For example, in corn expression of zein storage proteins is initiated in the endosperm about 15 days after pollination.

[0110] Ultimately, the most desirable DNA segments for introduction into a plant genome may be homologous genes or gene families which encode a desired trait (e.g., increased disease resistance) and which are introduced under the control of novel promoters or enhancers, etc., or perhaps even homologous or tissue-specific (e.g., root-, grain- or leaf-specific) promoters or control elements.

[0111] The genetically modified cells are screened for the presence of the introduced genetic material. The cells may be used in functional studies, drug screening, etc., e.g. to study chemical mode of action, to determine the effect of a candidate agent on pathogen growth, infection of plant cells, etc.

[0112] The modified cells are useful in the study of genetic function and regulation, for alteration of the cellular metabolism, and for screening compounds that may affect the biological function of the gene or gene product. For example, a series of small deletions and/or substitutions may be made in the host's native gene to determine the role of different domains and motifs in the biological function. Specific constructs of interest include anti-sense, as previously described, which will reduce or abolish expression, expression of dominant negative mutations, and over-expression of genes.

[0113] Where a sequence is introduced, the introduced sequence may be either a complete or partial sequence of a gene native to the host, or may be a complete or partial sequence that is exogenous to the host organism, e.g., an A. thaliana sequence inserted into wheat plants. A detectable marker, such as aldA, lac Z, etc. may be introduced into the locus of interest, where upregulation of expression will result in an easily detected change in phenotype.

[0114] One may also provide for expression of the gene or variants thereof in cells or tissues where it is not normally expressed, at levels not normally present in such cells or tissues, or at abnormal times of development, during sporulation, etc. By providing expression of the protein in cells in which it is not normally produced, one can induce changes in cell behavior.

[0115] DNA constructs for homologous recombination will comprise at least a portion of the provided gene or of a gene native to the species of the host organism, wherein the gene has the desired genetic modification(s), and includes regions of homology to the target locus (see Kempin et al. (1997) Nature 389:802-803). DNA constructs for random integration or episomal maintenance need not include regions of homology to mediate recombination. Conveniently, markers for positive and negative selection are included. Methods for generating cells having targeted gene modifications through homologous recombination are known in the art.

[0116] Embodiments of the invention provide processes for enhancing or inhibiting synthesis of a protein in a plant by introducing a provided nucleic acids sequence into a plant cell, where the nucleic acid comprises sequences encoding a protein of interest. For example, enhanced resistance to pathogens may be achieved by inserting a nucleic acid encoding an activator in a vector downstream from a promoter sequence capable of driving constitutive high-level expression in a plant cell. When grown into plants, the transgenic plants exhibit increased synthesis of resistance proteins, and increased resistance to pathogens.

[0117] Other embodiments of the invention provide processes for enhancing or inhibiting synthesis of a tolerance factor in a plant by introducing a nucleic acid of the invention into a plant cell, where the nucleic acid comprises sequences encoding a tolerance factor. For example, enhanced tolerance to an environmental stress may be achieved by inserting a nucleic acid encoding an activator in a vector downstream from a promoter sequence capable of driving constitutive high-level expression in a plant cell. When grown into plants, the transgenic plants exhibit increased synthesis of tolerance proteins, and increased tolerance to environmental stress.

[0118] Factors which are involved, directly or indirectly in biosynthetic pathways whose products are of commercial, nutritional, or medicinal value include any factor, usually a protein or peptide, which regulates such a biosynthetic pathway (e.g., an activator or repressor); which is an intermediate in such a biosynthetic pathway; or which is a product that increases the nutritional value of a food product; a medicinal product; or any product of commercial value and/or research interest. Plant and other cells may be genetically modified to enhance a trait of interest, by upregulating or down-regulating factors in a biosynthetic pathway.

### Screening Assays

[0119] The polypeptides encoded by the provided nucleic acid sequences, and cells genetically altered to express such sequences, are useful in a variety of screening assays to determine effect of candidate inhibitors, activators., or modifiers of the gene product. One may determine what insecticides, fungicides and the like have an enhancing or synergistic activity with a gene. Alternatively, one may screen for compounds that mimic the activity of the protein. Similarly, the effect of activating agents may be used to screen for compounds that mimic or enhance the activation of proteins. Candidate inhibitors of a particular gene product are screened by detecting decreased from the targeted gene product.

[0120] The screening assays may use purified target macromolecules to screen large compound libraries for inhibitory drugs; or the purified target molecule may be used for a rational drug design program, which requires first determining the structure of the macromolecular target or the structure of the macromolecular target in association with its customary substrate or ligand. This information is then used to design compounds which must be synthesized and tested further. Test results are used to refine the molecular models and drug design process in an iterative fashion until a lead compound emerges.

[0121] Drug screening may be performed using an in vitro model, a genetically altered cell, or purified protein. One can identify ligands or substrates that bind to, modulate or mimic the action of the target genetic sequence or its product. A wide variety of assays may be used for this purpose, including labeled in vitro protein-protein binding assays, electrophoretic mobility shift assays, immunoassays for protein binding, and the like. The purified protein may also be used for determination of three-dimensional crystal structure, which can be used for modeling intermolecular interactions.

[0122] Where the nucleic acid encodes a factor involved in a biosynthetic pathway, as described above, it may be desirable to identify factors, e.g., protein factors, which interact with such factors. One can identify interacting factors, ligands, substrates that bind to, modulate or mimic the action of the target genetic sequence or its product. A wide variety of assays may be used for this purpose, including labeled in vitro protein-protein binding assays, electrophoretic mobility shift assays, immunoassays for protein binding, and the like. In vivo assays for protein-protein interactions in E. coli and yeast cells are also well-established (see Hu et al. (2000) Methods 20:80-94; and Bai and Elledge (1997) Methods Enzymol. 283:141-156).

[0123] The purified protein may also be used for determination of three-dimensional crystal structure, which can be used for modeling intermolecular interactions. It may also be of interest to identify agents that modulate the interaction of a factor identified as described above with a factor encoded by a nucleic acid of the invention. Drug screening can be performed to identify such agents. For example, a labeled in vitro protein-protein binding assay can be used, which is conducted in the presence and absence of an agent being tested.

[0124] The term “agent” as used herein describes any molecule, e.g. protein or pharmaceutical, with the capability of altering or mimicking a physiological function. Generally a plurality of assay mixtures are run in parallel with different agent concentrations to obtain a differential response to the various concentrations. Typically, one of these concentrations serves as a negative control, i.e. at zero concentration or below the level of detection.

[0125] Candidate agents encompass numerous chemical classes, though typically they are organic molecules, preferably small organic compounds having a molecular weight of more than 50 and less than about 2,500 daltons. Candidate agents comprise functional groups necessary for structural interaction with proteins, particularly hydrogen bonding, and typically include at least an amine, carbonyl, hydroxyl or carboxyl group, preferably at least two of the functional chemical groups. The candidate agents often comprise cyclical carbon or heterocyclic structures and/or aromatic or polyaromatic structures substituted with one or more of the above functional groups. Candidate agents are also found among biomolecules including peptides, saccharides, fatty acids, steroids, purines, pyrimidines, derivatives, structural analogs or combinations thereof.

[0126] Candidate agents are obtained from a wide variety of sources including libraries of synthetic or natural compounds. For example, numerous means are available for random and directed synthesis of a wide variety of organic compounds and biomolecules, including expression of randomized oligonucleotides and oligopeptides. Alternatively, libraries of natural compounds in the form of bacterial, fungal, plant and organism extracts are available or readily produced. Additionally, natural or synthetically produced libraries and compounds are readily modified through conventional chemical, physical and biochemical means, and may be used to produce combinatorial libraries. Known pharmacological agents may be subjected to directed or random chemical modifications, such as acylation, alkylation, esterification, amidification, etc. to produce structural analogs.

[0127] Where the screening assay is a binding assay, one or more of the molecules may be joined to a label, where the label can directly or indirectly provide a detectable signal. Various labels include radioisotopes, fluorescers, chemiluminescers, enzymes, specific binding molecules, particles, e.g. magnetic particles, and the like. Specific binding molecules include pairs, such as biotin and streptavidin, digoxin and antidigoxin etc. For the specific binding members, the complementary member would normally be labeled with a molecule that provides for detection, in accordance with known procedures.

[0128] A variety of other reagents may be included in the screening assay. These include reagents like salts, neutral proteins, e.g. albumin, detergents, etc that are used to facilitate optimal protein-protein binding and/or reduce non-specific or background interactions. Reagents that improve the efficiency of the assay, such as protease inhibitors, nuclease inhibitors, anti-microbial agents, etc. may be used. The mixture of components are added in any order that provides for the requisite binding. Incubations are performed at any suitable temperature, typically between 4 and 40° C. Incubation periods are selected for optimum activity, but may also be optimized to facilitate rapid high-throughput screening. Typically between 0.1 and 1 hours will be sufficient.

[0129] The compounds having the desired biological activity may be administered in an acceptable carrier to a host. The active agents may be administered in a variety of ways. Depending upon the manner of introduction, the compounds may be formulated in a variety of ways. The concentration of therapeutically active compound in the formulation may vary from about 0.01-100 wt. %.

[0130] It must be noted that as used herein and in the appended claims, the singular forms “a”, “and”, and “the” include plural referents unless the context clearly dictates otherwise. Thus, for example, reference to “a complex” includes a plurality of such complexes and reference to “the formulation” includes reference to one or more formulations and equivalents thereof known to those skilled in the art, and so forth.

[0131] Unless defined otherwise, all technical and scientific terms used herein have the same meaning as commonly understood to one of ordinary skill in the art to which this invention belongs. Although any methods, devices and materials similar or equivalent to those described herein can be used in the practice or testing of the invention, the preferred methods, devices and materials are now described.

[0132] All publications mentioned herein are incorporated herein by reference for the purpose of describing and disclosing, for example, the methods and methodologies that are described in the publications which might be used in connection with the presently described invention. The publications discussed above and throughout the text are provided solely for their disclosure prior to the filing date of the present application. Nothing herein is to be construed as an admission that the inventors are not entitled to antedate such disclosure by virtue of prior invention.

[0133] The following examples are put forth so as to provide those of ordinary skill in the art with a complete disclosure and description of how to make and use the subject invention, and are not intended to limit the scope of what is regarded as the invention. Efforts have been made to ensure accuracy with respect to the numbers used (e.g. amounts, temperature, concentrations, etc.) but some experimental errors and deviations should be allowed for. Unless otherwise indicated, parts are parts by weight, molecular weight is average molecular weight, temperature is in degrees Celsius, and pressure is at or near atmospheric.

### EXPERIMENTAL

### Cloning and Characterization of Arabidopsis thaliana Genes

[0134] Following DNA isolation, sequencing was performed using the Dye Primer Sequencing protocol, below. The sequencing reactions were loaded by hand onto a 48 lane ABI 377 and run on a 36 cm gel with the 36E-2400 run module and extraction. Gel analysis was performed with ABI software.

[0135] The Phred program was used to read the sequence trace from the ABI sequencer, call the bases and produce a sequence read and a quality score for each base call in the sequence., (Ewing et al. (1998) Genome Research 8:175-185; Ewing and Green (1998) Genome Research 8:186-194.) PolyPhred may be used to detect single nucleotide polymorphisms in sequences (Kwok et al. (1994) Genomics 25:615-622; Nickerson et al. (1997) Nucleic Acids Research 25(14):2745-2751.)

[0136] MicroWave Plasmid Protocol: Fill Beckman 96 deep-well growth blocks with 1 ml of TB containing 50 μg of ampicillin per ml. Inoculate each well with a colony picked with a toothpick or a 96-pin tool from a glycerol stock plate. Cover the blocks with a plastic lid and tape at two ends to hold lid in place. Incubate overnight (16-24 hours depending on the host stain) at 37° C. with shaking at 275 rpm in a New Brunswick platform shaker. Pellet cells by centrifugation for 20 minutes at 3250 rpm in a Beckman GS-R6K, decant TB and freeze pelleted cell in the 96 well block. Thaw blocks on the bench when ready to continue.

[0137] Prepare the MW-Tween20 solution

| For four blocks: | For 16 blocks: |
|---|---|
| 50 ml STET/TWEEN20 | 200 ml STET/TWEEN |
| 2 tubes RNAse (10 mg/ml, 600 ul ea) | 8 tubes RNAse |
| 1 tube lysozyme (25 mg) | 4 tubes lysozyme |

[0138] Pipette RNAse and Lysozyme into the corner of a beaker. Add Tween 20 solution and swirl to mix completely. Use the Multidrop (or Biohit) to add 25 ul of sterile H₂O (from the L size autoclaved bottles) to each well. Resuspend the pellets by vortexing on setting 10 of the platform vortexer. Check pellets after 4 min. and repeat as necessary to resuspend completely. Use the multidrop to add 70 μl of the freshly prepared MW-Tween 20 solution to each well. Vortex at setting 6 on the platform vortex for 15 seconds. Do not cause frothing.

[0139] Incubate the blocks at room temperature for 5 min. Place two blocks at a time in the microwave (1000 Watts) with the tape (placed on the H1 to H12 side of the block) facing away from each other and turn on at full power for 30 seconds. Rotate the blocks so that the tapes face towards each other and turn on at full power again for 30 seconds.

[0140] Immediately remove the blocks from the microwave and add 300 μl of sterile ice cold H₂O with the Multidrop. Seal the blocks with foil tape and place them in an H₂O/ice bath. Vortex the blocks on 5 for 15 seconds and leave them in the H₂O/Ice bath. Return to step 7 until all the blocks are in the ice water bath. Incubate the blocks for 15 minutes on ice. Spin the blocks for 30 minutes in the Beckman GS-6KR with GH3.8 rotor with Microplus carrier at 3250 rpm.

[0141] Transfer 100 μl of the supernatant to Corning/Costar round bottom 96 well trays. Cover with foil and put into fridge if to be sequenced right away. If not to be sequenced in the next day, freeze them at −20° C.

[0142] Dye Primer Sequencing: Spin down the DP brew trays and DNA template by pulsing in the Beckman GS-6KR with GH3.8 rotor with Microplus carrier. Big Dye Primer reaction mix trays (one 96 well cycleplate (Robbins) for each nucleotide), 3 microliters of reaction mix per well.

[0143] Use twelve channel pipetter (Costar) to add 2 μl of template to one each G,A,T,C, trays for each template plate. Pulse again to get both the reaction mix and template into the bottom of the cycle plate and put them into the MJ Research DNA Tetrad (PTC-225).

[0144] Start program Dye-Primer. Dye-primer is:

[0145] 96° C., 1 min 1 cycle

[0146] 96° C., 10 sec.

[0147] 55° C., 5 sec.

[0148] 70° C., 1 min 15 cycles

[0149] 96° C., 10 sec.

[0150] 70° C., 1 min. 15 cycles

[0151] 4° C. soak

[0152] When done cycling, using the Robbins Hydra 290 add 100 μl of 100 % ethanol to the A reaction cycle plate and pool the contents of all four cycle plates into the appropriate well.

[0153] To perform ethanol precipitation: Use Hydra program 4 to add 100 μl 100% ethanol to each A tray. Use Hydra program 5 to transfer the ethanol and therefore combine the samples from plate to plate. Once the G, A, T, and C trays of each block are mixed, spin for 30 minutes at 3250 in the Beckman. Pour off the ethanol with a firm shake and blot on a paper towel before drying in the speed vac (˜10 minutes or until dry). If ready to load add 3 μl dye and denature in the oven at 95° C. for ˜5 minutes and load 2 μl. If to store, cover with tape and store at −20° C.

[0154] Common Solutions

[0155] Terrific Broth

[0156] Per liter:

[0157] 900 ml H₂O

[0158] 12 g bacto tryptone

[0159] 24 g bacto-yeast extract

[0160] 4 ml glycerol

[0161] Shake until dissolved and then autoclave. Allow the solution to cool to 60° C. or less and then add 100 ml of sterile 0.17M KH₂PO₄, 0.72M K₂HPO₄ (in the hood w/ sterile technique).

[0162] 0.17M KH₂PO₄, 0.72M K₂HPO₄

[0163] Dissolve 2.31 g of KH₂PO₄ and 12.54g of K₂HPO₄ in 90 ml of H₂O.

[0164] Adjust volume to 100 ml with H₂O and autoclave.

[0165] Sequence loading Dye

[0166] 20 ml deionized formamide

[0167] 3.6 ml dH₂O

[0168] 400 μl 0.5M EDTA, pH 8.0

[0169] 0.2 g Blue Dextran

[0170] *Light sensitive, cover in foil or store in the dark.

[0171] Stet/Tween

[0172] 10 ml 5M NaCl

[0173] 5 ml 1M Tris, pH 8.0

[0174] 1 ml 0.5M EDTA., pH 8.0

[0175] 25 ml Tween20

[0176] Bring volume to 500 ml with H₂O

[0177] The sequencing reactions are run on an ABI 377 sequencer per manufacturer's' instructions. The sequencing information obtained each run are analyzed as follows.

[0178] Sequencing reads are screened for ribosomal., mitochondrial., chloroplast or human sequence contamination.. In good sequences, vector is marked by x's. These sequences go into biolims regardless of whether or not they pass the criteria for a ‘good’ sequence. This criteria is >=100 bases with phred score of >=20 and 15 of these bases adjacent to each other.

[0179] Sequencing reads that pass the criteria for good sequences are downloaded for assembly into consensus sequences (contigs). The program Phrap (copyrighted by Phil Green at University of Washington, Seattle, Wash.) utilizes both the Phred sequence information and the quality calls to assemble the sequencing reads. Parameters used with Phrap were determined empirically to minimize assembly of chimeric sequences and maximize differential detection of closely related members of gene families. The following parameters were used with the Phrap program to perform the assembly:

| | | |
|---|---|---|
| Penalty | −6 | Penalty for mismatches (substitutions) |
| Minmatch | 40 | Minimum length of matching sequence to use in |
| | | assembly of reads |
| Trim penalty | 0 | penalty used for identifying degenerate sequence |
| | | at beginning and end of read. |
| Minscore | 80 | Minimum alignment score |

[0180] Results from the Phrap analysis yield either contigs consisting of a consensus of two or more overlapping sequence reads, or singlets that are non-overlapping.

[0181] The contig and singlets assembly were further analyzed to eliminate low quality sequence utilizing a program to filter sequences based on quality scores generated by the Phred program. The threshold quality for “high quality” base calls is 20. Sequences with less than 50 contiguous high quality bases calls at the beginning of the sequence, and also at the end of the sequence were discarded. Additionally, the maximum allowable percentage of “low quality base calls in the final sequence is 2%, otherwise the sequence is discarded.

[0182] The stand-alone BLAST programs and Genbank databases were downloaded from NCBI for use on secure servers at the Paradigm Genetics, Inc. site. The sequences from the assembly were compared to the GenBank NR database downloaded from NCBI using the gapped version (2.0) of BLASTX. BLASTX translates the DNA sequence in all six reading frames and compares it to an amino acid database. Low complexity sequences are filtered in the query sequence. (Altschul et al. (1997) Nucleic Acids Res 25(17):3389-402).

[0183] Genbank sequences found in the BLASTX search with an E Value of less than 1 e⁻¹⁰ are considered to be highly similar, and the Genbank definition lines were used to annotate the query sequences.

[0184] When no significantly similar sequences were found as a result of the BLASTX search, the query sequences were compared with the PROSITE database (Bairoch, A 1992) PROSITE: A dictionary of sites and patterns in proteins. Nucleic Acids Research 20:2013-2018. ) to locate functional motifs.

[0185] Query sequences were first translated in six reading frames using the Wisconsin GCG pepdata program (Wisconsin Package Version 10.0, Genetics Computer Group (GCG) , Madison, Wis., USA. ). The Wisconsin GCG motifs program (Wisconsin Package Version 10.0, Genetics Computer Group (GCG), Madison, Wis., USA.) was used to locate motifs in the peptide sequence, with no mismatches allowed. Motif names from the PROSITE results were used to annotate these query sequences.

TABLE 1

| SEQ ID | Reference | Annotation |
|---|---|---|
| 1 | 2026001 | 5E-15 > pir\|\|S65210 hypothetical protein YPL191c - yeast |
| | | (Saccharomyces cerevisiae) > gi\|1370399\|emb\|CAA97904\|(Z73547) ORF |
| | | YPL191c [Saccharomyces cerevisiae] Length = 360 |
| 2 | 2026002 | 1E-16 > dbj\|BAA82969.1\|(AB030653) epsilon-adaptin [Homo sapiens] |
| | | Length = 1137 |
| 3 | 2026003 | 1E-105 > gi\|3834312 (AC005679) Strong similarity to glycoprotein EP1 |
| | | gb\|L16983 Daucus carota and a member of S locus glycoprotein family PF\|00954. |
| | | ESTs gb\|AA067487, gb\|Z35737, gb\|Z30815, gb\|Z35350, gb\|AA713171, |
| | | gb\|AI100553, gb\|Z34248, gb\|AA728536, gb\|Z30816 an...Length = 455 |
| 4 | 2026004 | Rgd (337-339) |
| 5 | 2026005 | 8E-86 > emb\|CAA54506\|(X77301) GTPase [Glycine max] Length = 219 |
| 6 | 2026006 | Tyr_Phospho_Site (42-49) |
| 7 | 2026007 | Pkc_Phospho_Site (22-24) |
| 8 | 2026008 | Tyr_Phospho_Site (477-484) |
| 9 | 2026009 | 3E-99 > sp\|P14671\|TRP1_ARATH TRYPTOPHAN SYNTHASE BETA CHAIN 1 |
| | | PRECURSOR > gi\|99767\|pir\|\|A31393 tryptophan synthase (EC 4.2.1.20) beta |
| | | chain - Arabidopsis thaliana > gi\|166892 (M23872) tryptophan synthase beta |
| | | subunit [Arabidopsis |
| 10 | 2026010 | 4E-61 > emb\|CAA73303\|(Y12776) kinase [Arabidopsis thaliana] Length = |
| | | 472 |
| 11 | 2026011 | 2E-66 > emb\|CAB10172.1\|(Z97335) hydroxymethyltransferase [Arabidopsis |
| | | thaliana] Length = 471 |
| 12 | 2026012 | 2E-26 > sp\|P51831\|FABG_BACSU 3-OXOACYL-[ACYL-CARRIER PROTEIN] |
| | | REDUCTASE (3-KETOACYL-ACYL CARRIER PROTEIN REDUCTASE) > |
| | | gi\|2633963\|emb\|CAB13464\|(Z99112) 3-ketoacyl-acyl carrier protein reductase |
| | | [Bacillus subtilis] Length = 246 |
| 13 | 2026013 | Zinc_Finger_C3hc4 (1112-1121) |
| 14 | 2026014 | 1E-58 > sp\|P40978\|RS19_ORYSA 40S RIBOSOMAL PROTEIN S19 Length = |
| | | 146 |
| 15 | 2026015 | Zinc_Finger_C2h2 (1452-1473) |
| 16 | 2026016 | 1E-47 > emb\|CAB36812.1\|(AL035527) peptide transporter-like protein |
| | | [Arabidopsis thaliana] Length = 576 |
| 17 | 2026017 | 6E-12 > gi\|3033379 (AC004238) DNA-binding protein [Arabidopsis |
| | | thaliana] Length = 427 |
| 18 | 2026018 | 5E-30 > emb\|CAA18245.1\|(AL022224) terpene cyclase like protein |
| | | [Arabidopsis thaliana] Length = 573 |
| 19 | 2026019 | Tyr_Phospho_Site (774-780) |
| 20 | 2026020 | 3′ Pkc_Phospho_Site (141-143) |
| 21 | 2026021 | 5′ 7E-58 > gi\|5262222\|emblCAB45848.1\|(AL080254) reticuline oxidase-like |
| | | protein [Arabidopsis thaliana] Length = 532 |
| 22 | 2026022 | Tyr_Phospho_Site (1029-1037) |
| 23 | 2026023 | 2E-40 > sp\|P12357\|PSAG_SPIOL PHOTOSYSTEM I REACTION CENTRE |
| | | SUBUNIT V PRECURSOR (PHOTOSYSTEM I 9 KD PROTEIN) (PSI-G) > |
| | | gi\|72686\|pir\|\|F1SP5 photosystem I chain V precursor - spinach > |
| | | gi\|21299iemb\|CAA31524\|(X13134) PSI subunit V preprotein (AA −69 to 98) |
| | | [Spinacia oleracea] > gi\|2261 |
| 24 | 2026024 | Tyr_Phospho_Site (30-37) |
| 25 | 2026025 | 1E-103 > sp\|P43291\|ASK1_ARATH SERINE/THREONINE-PROTEIN KINASE |
| | | ASK1 > gi\|541890\|pir\|\|S36944 probable serine/threonine-specific protein kinase |
| | | (EC 2.7.1.-) (clone ASK1) - Arabidopsis thaliana > gi\|166882 (M91548) |
| | | serine/threonine kinase [Arabidopsis thaliana] > gi\|1931648 (U95973) Ser/ |
| 26 | 2026026 | 1E-77 > sp\|P46637\|ARGI_ARATH ARGINASE > gi\|602422 (U15019) arginase |
| | | [Arabidopsis thaliana] > gi\|4325373\|gb\|AAD17369\|(AF128396) Arabidopsis |
| | | thaliana arginase (SW: P46637) (Pfam:PF00491, Score = 419.6, E = 3.7e-142 N = 1) |
| | | [Arabidopsis thaliana] Length = 342 |
| 27 | 2026027 | 6E-87 > gi\|1399265 (U31751) calmodulin-domain protein kinase CDPK |
| | | isoform 9 [Arabidopsis thaliana] Length = 541 |
| 28 | 2026028 | Tyr_Phospho_Site (70-76) |
| 29 | 2026029 | Rgd (543-556) |
| 30 | 2026030 | 5E-69) > gi\|2062157 (AC001645) jasmonate inducible protein isolog |
| | | [Arabidopsis thaliana] Length = 705 |
| 31 | 2026031 | 8E-60 > emb\|CAA16524.1\|(AL021633) DNA topoisomerase like-protein |
| | | [Arabidopsis thaliana] Length = 1179 |
| 32 | 2026032 | Tyr_Phospho_Site (910-917) |
| 33 | 2026033 | 9E-43 > sp\|P21528\|MDHC PEA MALATE DEHYDROGENASE [NADP], |
| | | CHLOROPLAST PRECURSOR (NADP-MDH) > gi\|481222lpir\|\|S38346 malate |
| | | dehydrogenase (NADP+) (EC 1.1.1.82) - garden pea > gi\|397475\|emb\|CAA52614\| |
| | | (X74507) malate dehydrogenase (N |
| 34 | 2026034 | 5E-60 > gb\|AAD25801.1\|AC006550_9 (AC006550) Strong similarity to gi\|2244833 |
| | | centromere protein homolog from Arabidopsis thaliana chromosome 4 contig |
| | | gb\|Z97337. ESTs gb\|T20765 and gb\|AA586277 come from this gene. Length = |
| | | 1744 |
| 35 | 2026035 | 8E-14 > bbs\|1 75358 (S80863) delta 9 acyl-lipid desaturase/delta 9 acyl- |
| | | CoA desaturase homolog [Rosa hybrida = roses, cv. Kardinal, day-4 post-harvest |
| | | flowers, petals, Peptide Partial, 303 aa] [Rosa hybrida] Length = 303 |
| 36 | 2026036 | 3E-94 > gi\|2494130 (AC002376) Contains similarity to Glycine SRC2 |
| | | (gb\|AB000130). [Arabidopsis thaliana] Length = 578 |
| 37 | 2026037 | 2E-57 > gb\|AAD24407.1\|AF036304_1 (AF036304) scarecrow-like 7 [Arabidopsis |
| | | thaliana] Length = 112 |
| 38 | 2026038 | 3′ Tyr_Phospho_Site (91-98) |
| 39 | 2026039 | 3′ 3E-19 > gi\|461923\|sp\|P23304\|DEAD_ECOLI ATP-DEPENDENT RNA |
| | | HELICASE DEAD Length = 646 |
| 40 | 2026040 | 5′ 3E-57 > gi\|1388021 (U20345) UDP-glucose pyrophosphorylase |
| | | [Solanum tuberosum] Length = 477 |
| 41 | 2026041 | 5′ 6E-44 > gi\|6425103\|gb\|AAF08301.1\|(AF200326) SEC23B protein [Mus |
| | | musculus] Length = 767 |
| 42 | 2026042 | 3E-21 > gi\|2088651 (AF002109) hypersensitivity-related gene 201 isolog |
| | | [Arabidopsis thaliana] Length = 482 |
| 43 | 2026043 | Pkc_Phospho_Site (106-108) |
| 44 | 2026044 | Pkc_Phospho_Site (161-163) |
| 45 | 2026045 | 9E-22 > ref\|NP_002817.1\|PQSCN6\|quiescin Q6 > gi\|3004502\|gb\|AAC09010\| |
| | | (U97276) quiescin [Homo sapiens] Length = 582 |
| 46 | 2026046 | 5E-96 > emb\|CAB41139.1\|(AL049658) aldehyde dehydrogenase (NAD+)- |
| | | like protein [Arabidopsis thaliana] Length = 538 |
| 47 | 2026047 | Tyr_Phospho_Site (626-633) |
| 48 | 2026048 | 6E-41 > gi\|2979566 (AC003680) MADS box protein AGL20 [Arabidopsis |
| | | thaliana] Length = 214 |
| 49 | 2026049 | Wd_Repeats (319-333) |
| 50 | 2026050 | 1E-105 > gi\|21 60692 (U73527) B′ regulatory subunit of PP2A |
| | | [Arabidopsis thaliana] Length = 499 |
| 51 | 2026051 | Pkc_Phospho_Site (20-22) |
| 52 | 2026052 | 3E-48 > gi\|331 9340 (AF077407) contains similarity to E. coli cation |
| | | transport protein ChaC (GB:D90756) [Arabidopsis thaliana] Length = 197 |
| 53 | 2026053 | 1E-36 > dbj\|BAA16245\|(D90867) OXALYL-COA DECARBOXYLASE (EC |
| | | 4.1.1.8). [Escherichia coli] Length = 455 |
| 54 | 2026054 | Pkc_Phospho_Site (42-44) |
| 55 | 2026055 | Pkc_Phospho_Site (35-37) |
| 56 | 2026056 | Pkc_Phospho_Site (32-34) |
| 57 | 2026057 | 3′ 4E-20 > gi\|112785\|sp\|P05100\|3MG1_ECOLI DNA-3-METHYLADENINE |
| | | GLYCOSYLASE I (3-METHYLADENINE-DNA GLYCOSYLASE I, |
| | | CONSTITUTIVE) (TAG I) (DNA-3-METHYLADENINE GLYCOSIDASE I) > |
| | | gi]67508\|pir\|\|DGECM1 3-methyladenine DNA glycosylase (EC 3.2.2.-) I - |
| | | Escherichia coli > gi\|43030\|emb\|CAA27472\|(X03845) TAGI (aa 1-187) |
| | | [Escherichia coli] > gi\|147920 (J02606) 3-methyladenine-DNA glycosylase I (tag) |
| | | [Escherichia coli] > gi\|466687 (U00039) 3-methyladenine DNA glycosylase I, |
| | | constitutive [Escherichia coli] > gi\|1789971 (AE000432) 3-methyl-adenine DNA |
| | | glycosylase I, constitutive [Escherichia coli] Length = 187 |
| 58 | 2026058 | 3′ Tyr_Phospho_Site (873-881) |
| 59 | 2026059 | 5′ Rgd (672-674) |
| 60 | 2026060 | 5′ Pkc_Phospho_Site (34-36) |
| 61 | 2026061 | 5′ Tyr_Phospho_Site (442-450) |
| 62 | 2026062 | 5′ Tyr_Phospho_Site (1000-1008) |
| 63 | 2026063 | 5′ Pkc_Phospho_Site (77-79) |
| 64 | 2026064 | 5′ Zinc_Finger_C2h2 (152-174) |
| 65 | 2026065 | Tyr_Phospho_Site (649-656) |
| 66 | 2026066 | 1E-109 > gi\|3355471 (AC004218) lysophospholipase [Arabidopsis |
| | | thaliana] Length = 318 |
| 67 | 2026067 | Rgd (390-392) |
| 68 | 2026068 | 4E-56 > gi\|3033400 (AC004238) Ser/Thr protein kinase [Arabidopsis |
| | | thaliana] Length = 1257 |
| 69 | 2026069 | 2E-29 > sp\|P29610\|CY12_SOLTU CYTOCHROME C1, HEME PROTEIN |
| | | PRECURSOR (CLONE PC18I) Length = 260 |
| 70 | 2026070 | 1E-115 > sp\|P11035\|NIA2_ARATH NITRATE REDUCTASE 2 (NR2) > |
| | | gi\|66202\|pir\|\|RDMUNH nitrate reductase (NADH) (EC 1.6.6.1) 2 - Arabidopsis |
| | | thaliana > gi\|166782 (J03240) nitrate reductase (EC 1.6.6.1) [Arabidopsis thaliana] |
| | | Length = 917 |
| 71 | 2026071 | Tyr_Phospho_Site (222-228) |
| 72 | 2026072 | 1E-39 > sp\|P93779\|RL5_SOLME 60S RIBOSOMAL PROTEIN L5 > |
| | | gi\|1881380\|dbj\|BAA19415\|(AB001583) ribosomal protein L5 [Solanum |
| | | melongena] Length = 121 |
| 73 | 2026073 | 3E-58 > gi\|166867 (J05216) ribosomal protein S11 (probable start codon |
| | | at bp 67) [Arabidopsis thaliana] Length = 182 |
| 74 | 2026074 | Tyr_Phospho_Site (670-677) |
| 75 | 2026075 | 9E-84 ) > gi\|3540185 (AC004122) Highly Similar to branched-chain amino |
| | | acid aminotransferase [Arabidopsis thaliana] Length = 384 |
| 76 | 2026076 | 2E-77 > gi\|2076884 (U90522) lysine-ketoglutarate |
| | | reductase/saccharopine dehydrogenase [Arabidopsis thaliana] Length = 1064 |
| 77 | 2026077 | 6E-58 > emb\|CAB39679.1\|(AL049483) beta-galactosidase [Arabidopsis |
| | | thaliana] Length = 729 |
| 78 | 2026078 | 1E-60 > gb\|AAD25942.1\|AF085279_15 (AF085279) hypothetical Ser-Thr protein |
| | | kinase [Arabidopsis thaliana] Length = 485 |
| 79 | 2026079 | 3′ Tyr_Phospho_Site (570-576) |
| 80 | 2026080 | 5′ Pkc_Phospho_Site (29-31) |
| 81 | 2026081 | 5′ Tyr_Phospho_Site (187-195) |
| 82 | 2026082 | 5′ Ribosomal_S14 (455-477) |
| 83 | 2026083 | Tyr_Phospho_Site (358-366) |
| 84 | 2026084 | Pkc_Phospho_Site (68-70) |
| 85 | 2026085 | 6E-99 > emb\|CAA06431\|(AJ005194) receiver-like protein 3 [Arabidopsis |
| | | thaliana] Length = 444 |
| 86 | 2026086 | Tyr_Phospho_Site (619-626) |
| 87 | 2026087 | 3E-11 > gb\|AAD56411.1\|AF185269_1 (AF185269) bHLH transcription factor |
| | | GBOF-1 [Tulipa gesneriana] Length = 321 |
| 88 | 2026088 | 4E-45 > dbj\|BAA22813\|(D26015) CND41, chloroplast nucleoid DNA |
| | | binding protein [Nicotiana tabacum] Length = 502 |
| 89 | 2026089 | Tyr_Phospho_Site (53-60) |
| 90 | 2026090 | 3E-67 > gb\|AAD18156\|(AC006260) RNA-binding protein [Arabidopsis |
| | | thaliana] Length = 305 |
| 91 | 2026091 | 2E-34 > ref\|NP_001559.1\|PEIF3S6\|murine mammary tumor integration site 6 |
| | | (oncogene homolog) > gi\|2498490\|sp\|Q64252\|INT6_MOUSE VIRAL |
| | | INTEGRATION SITE PROTEIN INT-6 > gi\|2114363 (U62962) similar to mouse Int- |
| | | 6 [Homo sapiens] > gi\|2351382 (U54562) elF3-p48 [Homo sapiens] > gi\|2688818 |
| | | (U85947) Int-6 [Homo sapiens] > gi\|2695701 (U94175) mammary tumor-associated |
| | | protein INT6 [Homo sapiens] Length = 445 |
| 92 | 2026092 | Tyr_Phospho_Site (438-444) |
| 93 | 2026093 | 3′ 4E-80 > gi\|6382514\|gb\|AAF07800.1\|AC010704_25 (AC010704) acyl-CoA |
| | | synthetase [Arabidopsis thaliana] Length = 691 |
| 94 | 2026094 | 5′ 3E-80 > gi\|115420\|sp\|P12628\|MAOX_PHAVU MALATE OXIDOREDUCTASE |
| | | (MALIC ENZYME) (ME) (NADP-DEPENDENT MALIC ENZYME) (NADP-ME) > |
| | | gi\|65940\|pir\|\|DEFBC cinnamyl-alcohol dehydrogenase (EC 1.1.1.195) - kidney |
| | | bean > gi\|169327 (J03825) NADP-dependent malic enzyme [Phaseolus vulgaris] |
| | | Length = 589 |
| 95 | 2026095 | 5′ 3E-88 > gi\|4826399\|emb\|CAB42872.1\|(AJ012423) wall-associated kinase 2 |
| | | [Arabidopsis thaliana] Length = 732 |
| 96 | 2026096 | 5′ Tyr_Phospho_Site (323-331) |
| 97 | 2026097 | 5′ Pkc_Phospho_Site (6-8) |
| 98 | 2026098 | 5′ Tyr_Phospho_Site (94-101) |
| 99 | 2026099 | 5′ 1E-25 > gi\|5804782\|dbj\|BAA33755.2\|(AB017480) chloroplast FtsH protease |
| | | [Nicotiana tabacum] Length = 714 |
| 100 | 2026100 | 3E-13 > gb\|AAD25930.1\|AF085279_3 (AF085279) hypothetical Cys-3-His zinc |
| | | finger protein [Arabidopsis thaliana] Length = 597 |
| 101 | 2026101 | 4E-73 > sp\|P50362\|G3PA_CHLRE GLYCERALDEHYDE 3-PHOSPHATE |
| | | DEHYDROGENASE A, CHLOROPLAST PRECURSOR > gi\|1181548 (L27668) |
| | | glyceraldehyde-3-phosphate dehydrogenase [Chlamydomonas reinhardtii] Length = |
| | | 374 |
| 102 | 2026102 | 3E-66 > gb\|AAC78269.1\|AAC78269 (AC002330) vacuolar ATPase [Arabidopsis |
| | | thaliana] Length = 128 |
| 103 | 2026103 | 1E-101 > emb\|CAA19745\|(AL031004) monogalactosyldiacylglycerol |
| | | synthase-like protein [Arabidopsis thaliana] Length = 533 |
| 104 | 2026104 | 1E-23 > dbj\|BAA07555\|(D38552) The ha1539 protein is related to |
| | | cyclophilin. [Homo sapiens] Length = 645 |
| 105 | 2026105 | 2E-48 > sp\|P54609\|CC48_ARATH CELL DIVISION CYCLE PROTEIN 48 |
| | | HOMOLOG > gi\|2118115\|pir\|\|S60112 cell division control protein CDC48 homolog - |
| | | Arabidopsis thaliana > gi\|1019904 (U37587) cell division cycle protein [Arabidopsis |
| | | thalia |
| 106 | 2026106 | Pkc_Phospho_Site (71-73) |
| 107 | 2026107 | Pkc_Phospho_Site (62-64) |
| 108 | 2026108 | 2E-50 > gi\|2088651 (AF002109) hypersensitivity-related gene 201 isolog |
| | | [Arabidopsis thaliana] Length = 482 |
| 109 | 2026109 | Pkc_Phospho_Site (32-34) |
| 110 | 2026110 | 1E-100 > emb\|CAA19753\|(AL031004) ribosomal protein S6 - like |
| | | [Arabidopsis thaliana] Length = 250 |
| 111 | 2026111 | Tyr_Phospho_Site (335-342) |
| 112 | 2026112 | 4E-20 > emb\|CAA16874.2\|(AL021749) copper-binding protein-like |
| | | [Arabidopsis thaliana] Length = 336 |
| 113 | 2026113 | 2E-77 > gb\|AAD53877.1\|AF175124_1 (AF175124) SINAH1 protein [Gossypium |
| | | hirsutum] Length = 336 |
| 114 | 2026114 | 3′ 3E-48 > gi\|1590814 (U52851) arginine decarboxylase [Arabidopsis |
| | | thaliana] Length = 702 |
| 115 | 2026115 | 5′ 1E-90 > gi\|4973254\|gb\|AAD35004.1\|AF144386_1 (AF144386) thioredoxin f2 |
| | | [Arabidopsis thaliana] Length = 185 |
| 116 | 2026116 | 5′ 1E-32 > gi\|2655008\|gb\|AAB87859.1\|(AF017144) (1-4)-beta-mannan |
| | | endohydrolase [Lycopersicon esculentum] Length = 369 |
| 117 | 2026117 | 8E-22 > emb\|CAA08994.1\|(AJ010090) MAP3K alpha protein kinase |
| | | [Arabidopsis thaliana] Length = 582 |
| 118 | 2026118 | 1E-115 > gi\|3421102 (AF043530) 20S proteasome beta subunit PBB1 |
| | | [Arabidopsis thaliana] Length = 273 |
| 119 | 2026119 | Tyr_Phospho_Site (463-471) |
| 120 | 2026120 | 6E-67 > gb\|AAD15606\|(AC006232) flavonol sulfotransferase [Arabidopsis |
| | | thaliana] Length = 273 |
| 121 | 2026121 | 5E-12 > gi\|2511715 (AF019380) phosphatidylinositol-4-phosphate 5- |
| | | kinase [Arabidopsis thaliana] Length = 752 |
| 122 | 2026122 | 2E-15 > gb\|AAD24408.1\|AF036305_1 (AF036305) scarecrow-like 8 [Arabidopsis |
| | | thaliana] Length = 573 |
| 123 | 2026123 | Tyr_Phospho_Site (331-337) |
| 124 | 2026124 | Tyr_Phospho_Site (805-812) |
| 125 | 2026125 | 3E-55 > gi\|1935914 (U77347) lethal leaf-spot 1 homolog [Arabidopsis |
| | | thaliana] Length = 539 |
| 126 | 2026126 | 1E-116) > emb\|CAA68872\|(Y07597) shaggy-like kinase kappa |
| | | [Arabidopsis thaliana] Length = 375 |
| 127 | 2026127 | Pkc_Phospho_Site (402-404) |
| 128 | 2026128 | Tyr_Phospho_Site (770-778) |
| 129 | 2026129 | Tyr_Phospho_Site (224-230) |
| 130 | 2026130 | Pkc_Phospho_Site (65-67) |
| 131 | 2026131 | 5′ 8E-99 > gi\|2129562\|pir\|\|S71244 class III ADH, glutathione-dependent |
| | | formaldehyde dehydrogenase. - Arabidopsis thaliana > |
| | | gi\|1143388\|emb\|CAA57973\|(X82647) class III ADH, glutathione-dependent |
| | | formaldehyde dehydrogenase. [Arabidopsis thaliana] Length = 379 |
| 132 | 2026132 | 5′ 3E-47> gi\|1706000\|sp\|P53620\|COPG_BOVIN COATOMER GAMMA |
| | | SUBUNIT (GAMMA-COAT PROTEIN) (GAMMA-COP) > |
| | | gi\|1066165\|emb\|CAA63574\|(X92987) coat protein gamma-cop [Bos primigenius] |
| | | Length = 874 |
| 133 | 2026133 | 5′ 6E-40> gi\|1142619 (U18348) phaseolin G-box binding protein PG1 |
| | | [Phaseolus vulgaris] Length = 642 |
| 134 | 2026134 | 5′ Pkc_Phospho_Site (5-7) |
| 135 | 2026135 | 5′ 8E-84 > gi\|2052383 (U66345) calreticulin [Arabidopsis thaliana] |
| | | Length = 424 |
| 136 | 2026136 | 5′ 2E-77 > gi\|544018\|sp\|Q05085\|CHL1_ARATH NITRATE/CHLORATE |
| | | TRANSPORTER > gi\|1076359\|pir\|\|A45772 nitrate-inducible nitrate transporter - |
| | | Arabidopsis thaliana > gi\|166668 (L10357) CHL1 [Arabidopsis thaliana] > |
| | | gi\|3157921 (AC002131) Identical to nitrate/chlorate transporter cDNA gb\|L10357 |
| | | from A. tha |
| 137 | 2026137 | 5′ Pkc_Phospho_Site (53-55) |
| 138 | 2026138 | 2E-19 > gi\|1079720 (U39764) eukaryotic release factor 3 [Ricinus |
| | | communis] Length = 150 |
| 139 | 2026139 | 1E-96 ) > gb\|AAD25843.1\|AC006951_22 (AC006951) acyl-CoA synthetase |
| | | [Arabidopsis thaliana] > gi\|4689469\|gb\|AAD27905.1\|AC007213_3 (AC007213) |
| | | acyl-CoA synthetase [Arabidopsis thaliana] Length = 720 |
| 140 | 2026140 | 2E-25 > gi\|2281649 (AF003105) AP2 domain containing protein RAP2.12 |
| | | [Arabidopsis thaliana] Length = 317 |
| 141 | 2026141 | Tyr_Phospho_Site (180-186) |
| 142 | 2026142 | 3E-71 > gi\|2098778 (U96045) APS reductase [Arabidopsis thaliana] |
| | | Length = 455 |
| 143 | 2026143 | 2E-57 > gi\|3790593 (AF079185) RING-H2 finger protein RHY1a |
| | | [Arabidopsis thaliana] Length = 101 |
| 144 | 2026144 | Pkc_Phospho_Site (32-34) |
| 145 | 2026145 | 3E-50 > pir\|\|S59548 1-aminocyclopropane-1-carboxylate oxidase homolog |
| | | (clone 2A6) - Arabidopsis thaliana > gi\|599622\|emb\|CAA58151\|(X83096) 2A6 |
| | | [Arabidopsis thaliana] > gi\|2809261 (AC002560) F21B7.30 [Arabidopsis thalian |
| 146 | 2026146 | 2E-51 > sp\|Q96330\|FLAV_ARATH FLAVONOL SYNTHASE (FLS) > gi\|1628622 |
| | | (U72631) flavonol synthase [Arabidopsis thaliana] > gi\|1805305 (U84258) flavonol |
| | | synthase [Arabidopsis thaliana] > gi\|1805307 (U84259) flavonol synthase |
| | | [Arabidopsi |
| 147 | 2026147 | 2E-28 > sp\|P41056\|R33B_YEAST 60S RIBOSOMAL PROTEIN L33-B (L37B) |
| | | (YL37) (RP47) > gi\|630323\|pir\|\|S44069 ribosomal protein L35a.e.c15 - yeast |
| | | (Saccharomyces cerevisiae) > gi\|484241 (L23923) ribosomal protein L37 |
| | | [Saccharomyces cerevisiae] > gi\|1420537\|emb\|CAA99454\|(Z75142) ORF |
| | | YOR234c [Saccharomyces cerevisiae] Length = 107 |
| 148 | 2026148 | Tyr_Phospho_Site (101-108) |
| 149 | 2026149 | 1E-21 > gi\|2529342 (L76554) transketolase [Spinacia oleracea] Length = |
| | | 741 |
| 150 | 2026150 | 1E-118 > emb\|CAA16554\|(AL021635) cytochrome P450 like protein |
| | | [Arabidopsis thaliana] Length = 524 |
| 151 | 2026151 | Pkc_Phospho_Site (14-16) |
| 152 | 2026152 | 3′ 4E-17 > gi\|6225094\|sp\|Q9Z2B2\|BMCP_MOUSE BRAIN MITOCHONDRIAL |
| | | CARRIER PROTEIN BMCP1 > gi\|4139057 (AF076981) brain mitochondrial carrier |
| | | protein BMCP1 [Mus musculus] Length = 322 |
| 153 | 2026153 | 5′ 5E-77 > gi\|5670315\|gb\|AAD46681.1\|AF170909_1 (AF170909) SYNC1 |
| | | protein [Arabidopsis thaliana] Length = 572 |
| 154 | 2026154 | 5′ 4E-15 > gi\|1705450\|sp\|P54069\|BE46_SCHPO BEM46 PROTEIN > gi\|987287 |
| | | (U29892) temperature sensitive supressor of Saccharomyces cerevisiae |
| | | bem1/bud5 [Schizosaccharomyces pombe] Length = 338 |
| 155 | 2026155 | 5′ Protein_Kinase_Atp (257-280) |
| 156 | 2026156 | 3E-11 > ref\|NP_001528.1\|PHSBP1\|heat shock factor binding protein 1 > |
| | | gi\|3283409 (AF068754) heat shock factor binding protein 1 HSBP1 [Homo |
| | | sapiens] Length = 76 |
| 157 | 2026157 | Tyr_Phospho_Site (556-563) |
| 158 | 2026158 | 2E-91 > emb\|CAA05547\|(AJ002551) heat shock protein 70 [Arabidopsis |
| | | thaliana] Length = 650 |
| 159 | 2026159 | Pkc_Phospho_Site (23-25) |
| 160 | 2026160 | Tyr_Phospho_Site (701-709) |
| 161 | 2026161 | 2E-12 > emb\|CAA80337\|(Z22614) ubiquitin [Tetrahymena pyriformis] |
| | | Length = 379 |
| 162 | 2026162 | 2E-27 > gb\|AAD20122\|(AC006201) peptidyl-prolyl isomerase |
| | | [Arabidopsis thaliana] Length = 119 |
| 163 | 2026163 | 5E-43 > gi\|1732515 (U62744) myosin heavy chain-like protein |
| | | [Arabidopsis thaliana] Length = 209 |
| 164 | 2026164 | 2E-94 ) > gi\|1066501 (L22302) serine/threonine protein kinase |
| | | [Arabidopsis thaliana] Length = 425 |
| 165 | 2026165 | 5E-47 > emb\|CAA05024\|(AJ001808) succinyl-CoA-ligase beta subunit |
| | | [Arabidopsis thaliana] > gi\|4512693\|gb\|AAD21746.1\|(AC006569) succinyl-CoA |
| | | ligase beta subunit [Arabidopsis thaliana] Length = 421 |
| 166 | 2026166 | 1E-44 > emb\|CAA73156\|(Y12576) histone H2B [Arabidopsis thaliana] |
| | | Length = 150 |
| 167 | 2026167 | 1E-61 > sp\|P29513\|TBB5_ARATH TUBULIN BETA-5 CHAIN > |
| | | gi\|320186\|pir\|\|JQ1589 tubulin beta-5 chain - Arabidopsis thaliana > gi\|166902 |
| | | (M84702) beta-5 tubulin [Arabidopsis thaliana] Length = 449 |
| 168 | 2026168 | 1E-92 ) > sp\|O23066\|C862_ARATH CYTOCHROME P450 86A2 > gi\|2252844 |
| | | (AF013293) belongs to the cytochrome p450 family [Arabidopsis thaliana] > |
| | | gi\|6049886\|gb\|AAF02801.1\|AF195115_21 (AF195115) belongs to the |
| | | cytochrome p450 family [Arabidopsis thaliana] Length = 553 |
| 169 | 2026169 | 1E-121 > sp\|P93768\|PSD3_TOBAC 26S PROTEASOME REGULATORY |
| | | SUBUNIT S3 (NUCLEAR ANTIGEN 21D7) > gi\|1864003\|dbj\|BAA19252\| |
| | | (AB001422) 21D7 [Nicotiana tabacum] Length = 488 |
| 170 | 2026170 | 5′ 1E-69> gi\|2459417 (AC002332) pre-mRNA splicing factor PRP19 |
| | | [Arabidopsis thaliana] Length = 540 |
| 171 | 2026171 | 5′ 2E-33 > gi\|2392895 (AF017056) brassinosteroid insensitive 1 |
| | | [Arabidopsis thaliana] > gi\|5042156\|emb\|CAB44675.1\|(AL078620) brassinosteroid |
| | | insensitive 1 gene (BRI1) [Arabidopsis thaliana] Length = 1196 |
| 172 | 2026172 | 8E-31 > gi\|3402711 (AC004261) RNA-binding protein [Arabidopsis |
| | | thaliana] Length = 451 |
| 173 | 2026173 | 4E-15 > emb\|CAB10449.1\|(Z97341) limonene cyclase like protein |
| | | [Arabidopsis thaliana] Length = 1024 |
| 174 | 2026174 | Tyr_Phospho_Site (66-72) |
| 175 | 2026175 | 6E-61 > emb\|CAB51212.1\|(AL096860) pectinesterase-like protein |
| | | [Arabidopsis thaliana] Length = 594 |
| 176 | 2026176 | 4E-53 > sp\|P42731\|PAB2_ARATH POLYADENYLATE-BINDING PROTEIN 2 |
| | | (POLY(A) BINDING PROTEIN 2) (PABP 2) > gi\|304109 (L19418) poly(A)-binding |
| | | protein [Arabidopsis thaliana] > gi\|2911051\|emb\|CAA17561\|(AL021961) poly(A)- |
| | | binding protein [Arabidopsis thaliana] Length = 629 |
| 177 | 2026177 | Tyr_Phospho_Site (342-349) |
| 178 | 2026178 | 1E-30 > sp\|P42801\|INO1_ARATH MYO-INOSITOL-1-PHOSPHATE |
| | | SYNTHASE (IPS) > gi\|1161312 (U04876) myo-inositol-1 -phosphate synthase |
| | | [Arabidopsis thaliana] Length = 511 |
| 179 | 2026179 | 1E-19 > gi\|4200446 (AF102777) FYVE finger-containing phosphoinositide |
| | | kinase [Mus musculus] Length = 2052 |
| 180 | 2026180 | Pkc_Phospho_Site (11-13) |
| 181 | 2026181 | 3E-53 > sp\|O50039\|OTC_ARATH ORNITHINE CARBAMOYLTRANSFERASE |
| | | PRECURSOR (OTCASE) (ORNITHINE TRANSCARBAMYLASE) > |
| | | gi\|2764518\|emb\|CAA04115\|(AJ000476) Ornithine carbamoyltransferase |
| | | [Arabidopsis thaliana] > gi\|2764737\|emb\|CAA05510\|(AJ002524) ornithine |
| | | carbamoyltransferase [Arabidopsis thaliana] Length = 375 |
| 182 | 2026182 | 1E-167 > gb\|AAD23033.1\|AC006585_28 (AC006585) CONSTANS protein |
| | | [Arabidopsis thaliana] > gi\|4646235\|gb\|AAD26898.1\|AC007266_6 (AC007266) |
| | | CONSTANS protein [Arabidopsis thaliana] Length = 294 |
| 183 | 2026183 | Tyr_Phospho_Site (892-900) |
| 184 | 2026184 | 3E-75 > emb\|CAB52141.1\|(AJ012215) GAL83 protein [Solanum tuberosum] |
| | | Length = 289 |
| 185 | 2026185 | 9E-74 ) > gi\|4056467 (AC005990) Strong similarity to gb\|AB006693 |
| | | spermidine synthase from Arabidopsis thaliana. ESTs gb\|AA389822, gb\|T41794, |
| | | gb\|N38455, gb\|AI100106, gb\|F14442 and gb\|F14256 come from this gene. |
| | | [Arabidopsis thaliana] Length = 334 |
| 186 | 2026186 | Tyr_Phospho_Site (409-416) |
| 187 | 2026187 | 1E-17 > gb\|AAD38506.1\|AF126743_1 (AF126743) DNAJ domain-containing |
| | | protein MCJ [Homo sapiens] Length = 150 |
| 188 | 2026188 | 8E-65 > gb\|AAD26971.1\|AC007135_7 (AC007135) 40S ribosomal protein S14 |
| | | [Arabidopsis thaliana] Length = 150 |
| 189 | 2026189 | Pkc_Phospho_Site (24-26) |
| 190 | 2026190 | 3E-37 > gi\|3075390 (AC004484) protein kinase ARSK1 [Arabidopsis |
| | | thaliana] Length = 424 |
| 191 | 2026191 | 3E-75 > sp\|Q96283\|RB1A_ARATH RAS-RELATED PROTEIN RAB11A > |
| | | gi\|2598229\|emb\|CAA70112\|(Y08904) Rab11 protein [Arabidopsis thaliana] > |
| | | gi\|5541676\|emb\|CAB51182.1\|(AL096859) Rab11 protein [Arabidopsis thaliana] |
| | | Length = 217 |
| 192 | 2026192 | 1E-77 > sp\|P11574\|VATB_ARATH VACUOLAR ATP SYNTHASE SUBUNIT B |
| | | (V-ATPASE B SUBUNIT) (V-ATPASE 57 KD SUBUNIT) > gi\|81637\|pir\|\|A31886 |
| | | H+-transporting ATPase (EC 3.6.1.35) 57K chain - Arabidopsis thaliana > |
| | | gi\|166627 (J04185) nucleotide-binding subunit of vacuolar ATPase [Arabidopsis |
| | | thaliana] Length = 492 |
| 193 | 2026193 | 1E-64 > emb\|CAB43407.1\|(AL050300) ribosomal protein S14 [Arabidopsis |
| | | thaliana] Length = 150 |
| 194 | 2026194 | 3E-61 > gb\|AAD14479\|(AC005966) Strong similarity to gi\|3337350 |
| | | F13P17.3 permease from Arabidopsis thaliana BAC gb\|AC004481. [Arabidopsis |
| | | thaliana] Length = 543 |
| 195 | 2026195 | 2E-94 ) > gi\|3806098 (AF079100) arginine-tRNA-protein transferase 1; |
| | | Ate1p [Arabidopsis thaliana] Length = 629 |
| 196 | 2026196 | 4E-52 > pir\|\|JC4146 protochlorophyllide reductase (EC 1.3.1.33) - |
| | | cucumber > gi\|2244614\|dbj\|BAA21089\|(D50085) NADPH-protochlorophyllide |
| | | oxidoreductase [Cucumis sativus] Length = 398 |
| 197 | 2026197 | 1E-127 > sp\|Q96251 \|ATPO_ARATH ATP SYNTHASE DELTA CHAIN, |
| | | MITOCHONDRIAL PRECURSOR (OLIGOMYCIN SENSITIVITY CONFERRAL |
| | | PROTEIN) (OSCP) > gi\|1655482\|dbj\|BAA13600\|(D88375) delta subunit of |
| | | mitochondrial F1-ATPase [Arabidopsis thaliana] |
| 198 | 2026198 | 2E-20 > pir\|\|S31612 beta-1,3-glucanase homolog (clone A20) - rape |
| | | (fragment) > gi\|17734\|emb\|CAA49515\|(X69889) beta-1,3-glucanase homologue |
| | | [Brassica napus] Length = 139 |
| 199 | 2026199 | 9E-81 ) > sp\|P22953\|HS71_ARATH HEAT SHOCK COGNATE 70 KD |
| | | PROTEIN 1 > gi\|1072473\|pir\|\|S46302 heat shock cognate protein 70-1 - |
| | | Arabidopsis thaliana > gi\|397482\|emb\|CAA52684\|(X74604) heat shock protein 70 |
| | | cognate [Arabidopsis thaliana] Length = 651 |
| 200 | 2026200 | Rgd (645-647) |
| 201 | 2026201 | 6E-36 > gi\|3193292 (AF069298) similar to ATPases associated with |
| | | various cellular activites (Pfam: AAA.hmm, score: 230.91) [Arabidopsis thaliana] |
| | | Length = 371 |
| 202 | 2026202 | 3′ 1E-47 > gi\|2944446 (AF050756) cysteine endopeptidase precursor |
| | | [Ricinus communis] Length = 360 |
| 203 | 2026203 | 5′ 2E-64 > gi\|2895510 (AF033204) pectin methylesterase [Arabidopsis |
| | | thaliana] Length = 592 |
| 204 | 2026204 | 5′ 4E-12 > gi\|2059326\|dbj\|BAA19836\|(D67067) thymic epithelial cell surface |
| | | antigen [Mus musculus] Length = 515 |
| 205 | 2026205 | 5′ 4E-94 > gi\|4886307\|emb\|CAB43344.1\|(AJ242588) 1-deoxy-d-xylulose-5- |
| | | phosphate reductoisomerase [Arabidopsis thaliana] Length = 406 |
| 206 | 2026206 | 5′ Tyr_Phospho_Site (99-106) |
| 207 | 2026207 | 3E-71 > pir\|\|S47969 RCI14A protein - Arabidopsis thaliana > |
| | | gi\|540559\|emb\|CAA52237\|(X74140) RCI14A [Arabidopsis thaliana] Length = |
| | | 255 |
| 208 | 2026208 | Tyr_Phospho_Site (644-651) |
| 209 | 2026209 | Pkc_Phospho_Site (16-18) |
| 210 | 2026210 | Pkc_Phospho_Site (10-12) |
| 211 | 2026211 | 4E-80 > gi\|3033395 (AC004238) zinc-finger protein [Arabidopsis thaliana] |
| | | Length = 378 |
| 212 | 2026212 | Tyr_Phospho_Site (775-781) |
| 213 | 2026213 | 2E-41 > gi\|3790585 (AF079181) RING-H2 finger protein RHF1a |
| | | [Arabidopsis thaliana] Length = 329 |
| 214 | 2026214 | 2E-28 > sp\|Q14669\|TR12_HUMAN THYROID RECEPTOR INTERACTING |
| | | PROTEIN 12 (TRIP12) (KIAA0045) > gi\|460711\|dbj\|BAA05837\|(D28476) |
| | | KIAA0045 [Homo sapiens] Length = 1992 |
| 215 | 2026215 | 6E-39 > gi\|2062176 (AC001645) Myb-related transcription activator |
| | | (MybSt1 ) isolog [Arabidopsis thaliana] Length = 369 |
| 216 | 2026216 | 2E-81 > gi\|4191788 (AC005917) 1-aminocyclopropane-1-carboxylate |
| | | oxidase [Arabidopsis thaliana] Length = 310 |
| 217 | 2026217 | 9E-27 > emb\|CAB10299.1\|(Z97338) p140mDia like protein [Arabidopsis |
| | | thaliana] Length = 645 |
| 218 | 2026218 | 4E-80 > sp\|P29512\|TBB2_ARATH TUBULIN BETA-2/BETA-3 CHAIN > |
| | | gi\|320184\|pir\|\|JQ1587 tubulin beta chain - Arabidopsis thaliana > gi\|166898 |
| | | (M84700) beta-2 tubulin [Arabidopsis thaliana] > gi\|166900 (M84701) beta-3 tubulin |
| | | [Arabidopsis thaliana] Length = 450 |
| 219 | 2026219 | Pkc_Phospho_Site (86-88) |
| 220 | 2026220 | 2E-22 > emb\|CAA66149\|(X97547) PKF1 [Fagus sylvatica] Length = 204 |
| 221 | 2026221 | Tyr_Phospho_Site (994-1001) |
| 222 | 2026222 | 6E-40 > pir\|\|HSWT4 histone H4 - wheat > gi\|70773\|pir\|\|HSPM4 histone H4 - |
| | | garden pea Length = 102 |
| 223 | 2026223 | Pkc_Phospho_Site (8-10) |
| 224 | 2026224 | 1E-57 > emb\|CAB41 927.1\|(AL049751) ribosomal protein L13a like protein |
| | | [Arabidopsis thaliana] Length = 206 |
| 225 | 2026225 | 1E-54 > pir\|\|S52035 alcohol dehydrogenase homolog ADH3a - tomato |
| | | Length = 386 |
| 226 | 2026226 | 1E-52 > sp\|O22446\|HDAC_ARATH HISTONE DEACETYLASE (HD) > |
| | | gi\|2318131 (AF014824) histone deacetylase [Arabidopsis thaliana] Length = 501 |
| 227 | 2026227 | 5′ Rgd (996-998) |
| 228 | 2026228 | 5′ 1E-37 > gi\|1076414\|pir\|\|S52770 subtilisin-like proteinase (EC 3.4.21.-) - |
| | | Arabidopsis thaliana (fragment) > gi\|757534\|emb\|CAA59963\|(X85974) subtilisin- |
| | | like protease [Arabidopsis thaliana] Length = 746 |
| 229 | 2026229 | 5′ 9E-38 > gi\|5541666\|emb\|CAB51172.1\|(AL096859) protein kinase 6-like |
| | | protein [Arabidopsis thaliana] Length = 475 |
| 230 | 2026230 | 5′ Tyr_Phospho_Site (572-580) |
| 231 | 2026231 | 5E-52 > pir\|\|S39484 DNA-binding protein GT-2 - Arabidopsis thaliana > |
| | | gi\|416490\|emb\|CAA51289\|(X72780) GT-2 factor [Arabidopsis thaliana] Length = |
| | | 575 |
| 232 | 2026232 | 7E-39 > gi\|2213882 (AF004165) 2-isopropylmalate synthase |
| | | [Lycopersicon pennellii] Length = 589 |
| 233 | 2026233 | Tyr_Phospho_Site (418-426) |
| 234 | 2026234 | 2E-70 > emb\|CAA74320\|(Y13987) chloroplast NAD-MDH [Arabidopsis |
| | | thaliana] Length = 403 |
| 235 | 2026235 | 1E-54 > pir\|\|S51839 D13F(MYBST1) protein - potato > |
| | | gi\|786426\|bbs\|159122 (S74753) MybSt1 = Myb-related transcriptional activator |
| | | {DNA-binding domain repeats} [Solanum tuberosum = potatoes, leaf, Peptide, 342 |
| | | aa] [Solanum tuberosum] Length = 342 |
| 236 | 2026236 | 1E-115 > gi\|1750376 (U80808) ubiquitin activating enzyme [Arabidopsis |
| | | thaliana] > gi\|3150409 (AC004165) ubiquitin activating enzyme (UBA1) |
| | | [Arabidopsis thaliana] Length = 1080 |
| 237 | 2026237 | 1E-102 > gb\|AAD21777.1\|(AC007069) histidine kinase, sensory |
| | | transduction [Arabidopsis thaliana] Length = 600 |
| 238 | 2026238 | 8E-14 > dbj\|BAA75919.1\|(AB009340) tartrate-resistant acid phoshatase |
| | | [Oryctolagus cuniculus] Length = 325 |
| 239 | 2026239 | 1E-25 > gb\|AAD14519\|(AC006200) protein kinase [Arabidopsis thaliana] |
| | | Length = 452 |
| 240 | 2026240 | 3E-30 > gi\|2829899 (AC002311) similar to ripening-induced protein, |
| | | gp\|AJ001449\|2465015 and major#latex protein, gp\|X91961\|1107495 [Arabidopsis |
| | | thaliana] Length = 160 |
| 241 | 2026241 | Tyr_Phospho_Site (1051-1058) |
| 242 | 2026242 | Tyr_Phospho_Site (858-864) |
| 243 | 2026243 | 3E-65 > dbj\|BAA19529\|(AB002560) CUC2 [Arabidopsis thaliana] Length = |
| | | 375 |
| 244 | 2026244 | Tyr_Phospho_Site (560-567) |
| 245 | 2026245 | 5′ 4E-48 > gi\|1076634\|pir\|\|S52578 protein-serine/threonine kinase NPK15 - |
| | | common tobacco > gi\|505146\|dbj\|BAA06538\|(D31737) protein-serine/threonine |
| | | kinase [Nicotiana tabacum] Length = 422 |
| 246 | 2026246 | 5′ Tyr_Phospho_Site (62-69) |
| 247 | 2026247 | 5′ 9E-11 > gi\|112802\|sp\|P17814\|4CL_ORYSA 4-COUMARATE-COA LIGASE > |
| | | gi\|82454\|pir\|\|JU0311 4-coumarate-CoA ligase (EC 6.2.1.12) - rice > |
| | | gi\|20161\|emb\|CAA36850\|(X52623) 4-coumarate-CoA ligase [Oryza sativa] |
| | | Length = 563 |
| 248 | 2026248 | Tyr_Phospho_Site (40-46) |
| 249 | 2026249 | Tyr_Phospho_Site (332-339) |
| 250 | 2026250 | 6E-87 > gb\|AAD31349.1\|AC007212_5 (AC007212) MAP kinase 7 [Arabidopsis |
| | | thaliana] Length = 368 |
| 251 | 2026251 | Pkc_Phospho_Site (11-13) |
| 252 | 2026252 | 2E-11 > gi\|3395938 (AF076924) polypyrimidine tract-binding protein |
| | | homolog [Arabidopsis thaliana] Length = 418 |
| 253 | 2026253 | 4E-64 > pir\|\|S55242 ubiquitin-like protein 7 - Arabidopsis thaliana Length = |
| | | 154 |
| 254 | 2026254 | 3E-59 > emb\|CAA07230\|(AJ006764) deoxycytidylate deaminase [Cicer |
| | | arietinum] Length = 186 |
| 255 | 2026255 | 3′ 3E-60 > gi\|4468803\|emb\|CAB38204\|(AL035601) cytochrome P450-like |
| | | protein [Arabidopsis thaliana] Length = 497 |
| 256 | 2026256 | 5′ Tyr_Phospho_Site (344-352) |
| 257 | 2026257 | 5′ Tyr_Phospho_Site (380-387) |
| 258 | 2026258 | 5′ Rgd (579-581) |
| 259 | 2026259 | 5′ 4E-14 > gi\|322752\|pir\|\|A44226 auxin-independent growth promoter - |
| | | Nicotiana tabacum > gi\|559921\|emb\|CAA56570\|(X80301) axi 1 [Nicotiana |
| | | tabacum] Length = 569 |
| 260 | 2026260 | 5′ Tyr_Phospho_Site (127-135) |
| 261 | 2026261 | 5′ 3E-31 > gi\|5702018\|emb\|CAB52246.1\|(AJ245478) alpha |
| | | galactosyltransferase [Trigonella foenum-graecum] Length = 438 |
| 262 | 2026262 | 1E-36 > emb\|CAA05025\|(AJ001809) succinate dehydrogenase |
| | | flavoprotein alpha subunit [Arabidopsis thaliana] Length = 634 |
| 263 | 2026263 | Pkc_Phospho_Site (2-4) |
| 264 | 2026264 | Tyr_Phospho_Site (326-332) |
| 265 | 2026265 | Tyr_Phospho_Site (75-82) |
| 266 | 2026266 | Tyr_Phospho_Site (198-204) |
| 267 | 2026267 | 4E-99 > gi\|3599491 (AF085149) aminotransferase [Capsicum chinense] |
| | | Length = 459 |
| 268 | 2026268 | Pkc_Phospho_Site (95-97) |
| 269 | 2026269 | Pkc_Phospho_Site (30-32) |
| 270 | 2026270 | 8E-19 > pir\|\|S55884 zinc finger protein 4 - Arabidopsis thaliana > gi\|790679 |
| | | (L39647) zinc finger protein [Arabidopsis thaliana] Length = 259 |
| 271 | 2026271 | Tyr_Phospho_Site (700-707) |
| 272 | 2026272 | 8E-97 > gi\|3335349 (AC004512) Similar to gb\|U46691 chromatin |
| | | structure regulator (SUPT6H) from Homo sapiens. ESTs gb\|T42908, gb\|AA586170 |
| | | and gb\|AA395125 come from this gene. [Arabidopsis thaliana] Length = 16 |
| 273 | 2026273 | 1E-23 > emb\|CAB37562\|(AL035538) protein [Arabidopsis thaliana] Length = |
| | | 753 |
| 274 | 2026274 | 9E-53 > gi\|2827143 (AF027174) cellulose synthase catalytic subunit |
| | | [Arabidopsis thaliana] Length = 1065 |
| 275 | 2026275 | 6E-44 > emb\|CAA06758\|(AJ005901) vag1 [Arabidopsis thaliana] > |
| | | gi\|5853315\|gb\|AAD54418.1\|(AF181688) vacuolar membrane ATPase subunit G |
| | | [Arabidopsis thaliana] Length = 110 |
| 276 | 2026276 | 5′ Tyr_Phospho_Site (61-68) |
| 277 | 2026277 | 5′ Tyr_Phospho_Site (157-164) |
| 278 | 2026278 | 5′ Pkc_Phospho_Site (51-53) |
| 279 | 2026279 | 5′ Tyr_Phospho_Site (538-545) |
| 280 | 2026280 | 5′ 1E-91 > gi\|2492860\|sp\|Q42522\|GSA2_ARATH GLUTAMATE-1 - |
| | | SEMIALDEHYDE 2,1-AMINOMUTASE 2 PRECURSOR (GSA 2) (GLUTAMATE-1 - |
| | | SEMIALDEHYDE AMINOTRANSFERASE 2) (GSA-AT 2) > gi\|498914 (U10278) |
| | | glutamate-1-semialdehyde aminotransferase [Arabidopsis thaliana] Length = 472 |
| 281 | 2026281 | 5′ 2E-57 > gi\|2129471\|pir\|\|S51836 glyceraldehyde-3-phosphate |
| | | dehydrogenase (EC 1.2.1.12) precursor - Scotch pine > gi\|1100223 (L32560) |
| | | glyceraldehyde-3-phosphate dehydrogenase [Pinus sylvestris] Length = 433 |
| 282 | 2026282 | 5′ 6E-58> gi\|4512666\|gb\|AAD21720.1\|(AC006931) mei2 protein [Arabidopsis |
| | | thaliana] Length = 803 |
| 283 | 2026283 | Pkc_Phospho_Site (13-15) |
| 284 | 2026284 | Pkc_Phospho_Site (26-28) |
| 285 | 2026285 | 1E-66 ) > gb\|AAD37122.1\|AF129511_1 (AF129511) very-long-chain fatty acid |
| | | condensing enzyme CUT1 [Arabidopsis thaliana] Length = 497 |
| 286 | 2026286 | 6E-46 > emb\|CAA68194\|(X99938) RNA helicase [Arabidopsis thaliana] |
| | | Length = 671 |
| 287 | 2026287 | 2E-49 > sp\|P43298\|TMK1_ARATH RECEPTOR PROTEIN KINASE TMK1 |
| | | PRECURSOR > gi\|322579\|pir\|\|JQ1674 receptor protein kinase TMKI (EC 2.7.1.-) |
| | | precursor - Arabidopsis thaliana > gi\|166888 (L00670) protein kinase [Arabidopsis |
| | | thaliana] Length = 942 |
| 288 | 2026288 | 8E-58 > sp\|O04090\|FER2_ARATH FERREDOXIN 2 PRECURSOR > |
| | | gi\|1931646 (U95973) ferredoxin precusor isolog [Arabidopsis thaliana] Length = |
| | | 148 |
| 289 | 2026289 | 9E-75 > gi\|2342728 (AC002341) Cysteine proteinase isolog [Arabidopsis |
| | | thaliana] Length = 345 |
| 290 | 2026290 | Pkc_Phospho_Site (158-160) |
| 291 | 2026291 | 1E-16 > gi\|1109880 (U41543) Similar to Rat trg gene product; coded for |
| | | by C. elegans cDNA yk31e7.5; coded for by C. elegans cDNA yk40d6.5; coded for |
| | | by C. elegans cDNA yk31e7.3; coded for by C. elegans cDNA yk40d6.3; coded for |
| | | by C. elegans cDNA yk149g5.3; cod. . . Length = 2018 |
| 292 | 2026292 | Tyr_Phospho_Site (513-521) |
| 293 | 2026293 | 1E-90 > gi\|3337356 (AC004481) protein transport protein SEC61 alpha |
| | | subunit [Arabidopsis thaliana] Length = 475 |
| 294 | 2026294 | Tyr_Phospho_Site (240-247) |
| 295 | 2026295 | 2E-74 > sp\|P94111\|STS1_ARATH STRICTOSIDINE SYNTHASE ½ |
| | | PRECURSOR > gi\|1754983 (U43713) strictosidine synthase [Arabidopsis thaliana] > |
| | | gi\|1754985 (U43945) strictosidine synthase [Arabidopsis thaliana] Length = 335 |
| 296 | 2026296 | 9E-85 > sp\|P37106\|SR51_ARATH SIGNAL RECOGNITION PARTICLE 54 KD |
| | | PROTEIN 1 (SRP54) > gi\|629560\|pir\|\|S42550 signal recognition particle 54K |
| | | protein - Arabidopsis thaliana > gi\|304111 (L19997) signal recognition particle 54 |
| | | kDa subun |
| 297 | 2026297 | 9E-58 > sp\|P42759\|DH10_ARATH DEHYDRIN ERD10 (LOW-TEMPERATURE- |
| | | INDUCED PROTEIN LTI45) > gi\|2129638\|pir\|\|S60480 low temperature-induced |
| | | protein Iit29 - Arabidopsis thaliana > gi\|556472\|dbj\|BAA04568\|(D17714) ERD10 |
| | | protein [Arabidopsis thaliana] > gi\|975648\|emb\|CAA62448\|(X90958) Iti29 |
| | | [Arabidopsis thaliana] Length = 260 |
| 298 | 2026298 | Tyr_Phospho_Site (432-438) |
| 299 | 2026299 | 8E-33 > sp\|Q00874\|D100_ARATH DNA-DAMAGE-REPAIR/TOLERATION |
| | | PROTEIN DRT100 PRECURSOR > gi\|99720\|pir\|\|S22863 hypothetical protein - |
| | | Arabidopsis thaliana > gi\|421844\|pir\|\|A46260 RecA functional analog DRT100 - |
| | | Arabidopsis thaliana (fragment) > gi\|5701788\|emb\|CAA47109.2\|(X66482) orf |
| | | [Arabidopsis thaliana] Length = 395 |
| 300 | 2026300 | 5′ Pkc_Phospho_Site (106-108) |
| 301 | 2026301 | 5′ 8E-52 > gi\|3395938 (AF076924) polypyrimidine tract-binding protein |
| | | homolog [Arabidopsis thaliana] Length = 418 |
| 302 | 2026302 | 5′ Pkc_Phospho_Site (12-14) |
| 303 | 2026303 | 5′ 1E-55 > gi\|3819164\|emb\|CAA09989.1\|(AJ012318) cytosolicchaperonin, |
| | | delta-subunit [Glycine max] Length = 533 |
| 304 | 2026304 | 5′ Tyr_Phospho_Site (132-139) |
| 305 | 2026305 | 5′ 1E-25 > gi\|4490321\|emb\|CAB38705.1\|(AJ011604) nitrate transporter |
| | | [Arabidopsis thaliana] Length = 577 |
| 306 | 2026306 | 5′ Pkc_Phospho_Site (31-33) |
| 307 | 2026307 | 5′ 1E-99 > gi\|2760836\|gb\|AAB95304.1\|(AC003105) Ser/Thr protein kinase |
| | | [Arabidopsis thaliana] Length = 676 |
| 308 | 2026308 | 5′ 1E-73 > gi\|3786011 (AC005499) elongation factor [Arabidopsis |
| | | thaliana] Length = 286 |
| 309 | 2026309 | 5′ Pkc_Phospho_Site (24-26) |
| 310 | 2026310 | 5′ 3E-31 > gi\|4585576\|gb\|AAD25541.1\|AF134051_1 (AF134051) fructose-1,6- |
| | | bisphosphatase precursor [Solarium tuberosum] Length = 408 |
| 311 | 2026311 | 2E-64 > gb\|AAD44539.1\|(AF113522) acetoacetyl CoA thiolase [Zea mays] |
| | | Length = 214 |
| 312 | 2026312 | Tyr_Phospho_Site (306-314) |
| 313 | 2026313 | 2E-31 > gi\|1655930 (U66564) RUSH-1 alpha [Oryctolagus cuniculus] |
| | | Length = 1005 |
| 314 | 2026314 | Pkc_Phospho_Site (5-7) |
| 315 | 2026315 | 2E-26 > pir\|\|S51171 amino acid transporter AAT1 - Arabidopsis thaliana > |
| | | gi\|2911069\|emb\|CAA17531.1\|(AL021960) amino acid transport protein AAT1 |
| | | [Arabidopsis thaliana] Length = 533 |
| 316 | 2026316 | 2E-25 > emb\|CAB36850.1\|(AL035528) RNA-binding protein like |
| | | [Arabidopsis thaliana] Length = 126 |
| 317 | 2026317 | 1E-80 > sp\|O04834\|SARA_ARATH GTP-BINDING PROTEIN SAR1A > |
| | | gi\|1314860 (U56929) Sar1 homolog [Arabidopsis thaliana] > |
| | | gi\|2104532\|gb\|AAC78700.1\|(AF001308) SAR1/GTP-binding secretory factor |
| | | [Arabidopsis thaliana] > gi\|2104550 (AF00153 |
| 318 | 2026318 | Pkc_Phospho_Site (40-42) |
| 319 | 2026319 | 1E-102 > emb\|CAA06772.1\|(AJ005930) squalene epoxidase homologue |
| | | [Arabidopsis thaliana] Length = 514 |
| 320 | 2026320 | 7E-67 ) > emb\|CAB36747.1\|(AL035523) acyl carrier-like protein |
| | | [Arabidopsis thaliana] Length = 137 |
| 321 | 2026321 | Tyr_Phospho_Site (519-526) |
| 322 | 2026322 | Tyr_Phospho_Site (880-887) |
| 323 | 2026323 | 1E-162 ) > gb\|AAD22107.1\|(AF132475) heme oxygenase 1 [Arabidopsis |
| | | thaliana] > gi\|4530593\|gb\|AAD22108.1\|(AF132476) heme oxygenase 1 |
| | | [Arabidopsis thaliana] > gi\|4877362\|dbj\|BAA77758.1\|(AB021857) plastid heme |
| | | oxygenase [Arabidopsis thaliana] > gi\|4877397\|dbj\|BAA77759.1\|(AB021858) |
| | | plastid heme oxygenase [Arabidopsis thaliana] > gi\|4883666\|gb\|AAB95301.2\| |
| | | (AC003105) heme oxygenase 1 (HO1 [Arabidopsis thaliana] Length = 282 |
| 324 | 2026324 | 6E-48 > emb\|CAA18104.1\|(AL022140) pectinesterase like protein |
| | | [Arabidopsis thaliana] Length = 541 |
| 325 | 2026325 | Tyr_Phospho_Site (915-922) |
| 326 | 2026326 | 3′ 2E-83 > gi\|2950210\|emb\|CAA74965\|(Y14615) Importin alpha-like protein |
| | | [Arabidopsis thaliana] Length = 535 |
| 327 | 2026327 | 3′ Tyr_Phospho_Site (750-756) |
| 328 | 2026328 | 3′ 4E-51 > gi\|3041724\|sp\|P46470\|PRS8_XENLA 26S PROTEASE |
| | | REGULATORY SUBUNIT 8 (SUG1 HOMOLOG) (XSUG1) > |
| | | gi\|1877414\|emb\|CAA57512\|(X81986)XSUG1 [Xenopus laevis] Length = 461 |
| 329 | 2026329 | 5′ Tyr_Phospho_Site (92-100) |
| 330 | 2026330 | 5′ Pkc_Phospho_Site (7-9) |
| 331 | 2026331 | 5′ Pkc_Phospho_Site (5-7) |
| 332 | 2026332 | 5′ Pkc_Phospho_Site (13-15) |
| 333 | 2026333 | 8E-34 > emb\|CAB51544.1\|(AJ243875) RAD23 protein [Lycopersicon |
| | | esculentum] Length = 389 |
| 334 | 2026334 | 8E-72 > emb\|CAB10185.1\|(Z97335) major latex protein like [Arabidopsis |
| | | thaliana] Length = 151 |
| 335 | 2026335 | 2E-12 > gb\|AAD25743.1\|AC007060_1 (AC007060) Strong similarity to gi\|2245113 |
| | | glycerol-3-phosphate permease homolog from Arabidopsis thaliana BAC |
| | | gb\|Z97343 and a member of the PF\|00083 Sugar transporter family. Length = 510 |
| 336 | 2026336 | 2E-28 > emb\|CAB46000.1\|(Z97335) selenium-binding protein like |
| | | [Arabidopsis thaliana] Length = 478 |
| 337 | 2026337 | Pkc_Phospho_Site (87-89) |
| 338 | 2026338 | 3E-73 > gb\|AAD50011.1\|AC007651_6 (AC007651) Similar to translation initiation |
| | | factor IF2 [Arabidopsis thaliana] Length = 1016 |
| 339 | 2026339 | Tyr_Phospho_Site (453-460) |
| 340 | 2026340 | 3E-54 > sp\|O23264\|SBP_ARATH SELENIUM-BINDING PROTEIN > |
| | | gi\|2244759\|emb\|CAB10182.1\|(Z97335) selenium-binding protein like |
| | | [Arabidopsis thaliana] Length = 490 |
| 341 | 2026341 | Tyr_Phospho_Site (1296-1304) |
| 342 | 2026342 | 1E-20 > sp\|P53492\|ACT2_ARATH ACTIN 2/7 > gi\|2129525\|pir\|\|S71210 actin 2 - |
| | | Arabidopsis thaliana > gi\|2129528\|pir\|\|S68107 actin 7 - Arabidopsis thaliana > |
| | | gi\|1049307 (U37281) actin-2 [Arabidopsis thaliana] > gi\|1943863 (U27811) actin7 |
| | | [Arabidopsis thaliana] Length = 377 |
| 343 | 2026343 | Pkc_Phospho_Site (227-229) |
| 344 | 2026344 | Tyr_Phospho_Site (400-406) |
| 345 | 2026345 | 1E-104 > gi\|3600060 (AF080120) contains similarity to protein kinases |
| | | (Pfam: pkinase.hmm, score: 24.94) [Arabidopsis thaliana] Length = 521 |
| 346 | 2026346 | 2E-60 ) > sp\|P23686\|METK_ARATH S-ADENOSYLMETHIONINE |
| | | SYNTHETASE 1 (METHIONINE ADENOSYLTRANSFERASE 1) (ADOMET |
| | | SYNTHETASE 1) > gi\|81647\|pir\|\|JN0131 methionine adenosyltransferase (EC |
| | | 2.5.1.6) - Arabidopsis thaliana > gi\|166872 (M55077) S-adenosylmethionine |
| | | synthetase [Arabidopsis thaliana] Length = 393 |
| 347 | 2026347 | 2E-64 > dbj\|BAA84423.1\|(AP000423) ribosomal protein S3 [Arabidopsis |
| | | thaliana] Length = 218 |
| 348 | 2026348 | 3′ 2E-28 > gi\|3776005\|emb\|CAA09205\|(AJ010466) RNA helicase [Arabidopsis |
| | | thaliana] Length = 451 |
| 349 | 2026349 | 5′ Pkc_Phospho_Site (50-52) |
| 350 | 2026350 | 5′ Pkc_Phospho_Site (31-33) |
| 351 | 2026351 | 5′ 2E-90 > gi\|6223641\|gb\|AAF05855.1\|AC011698_6 (AC011698) T-complex |
| | | protein 1, theta subunit (TCP-1-Theta) [Arabidopsis thaliana] Length = 528 |
| 352 | 2026352 | 5′ Tyr_Phospho_Site (780-788) |
| 353 | 2026353 | 5′ Tyr_Phospho_Site (677-683) |
| 354 | 2026354 | 4E-23 > gi\|3329229 (AE001349) tRNA isopentenylpyrophosphate |
| | | transferase [Chlamydia trachomatis] Length = 339 |
| 355 | 2026355 | Tyr_Phospho_Site (449-456) |
| 356 | 2026356 | Tyr_Phospho_Site (131-137) |
| 357 | 2026357 | 2E-68 > gi\|2618721 (U49072) IAA16 [Arabidopsis thaliana] > |
| | | gi\|6175173\|gb\|AAF04899.1\|AC011437_14 (AC011437) auxin-induced protein |
| | | [Arabidopsis thaliana] Length = 236 |
| 358 | 2026358 | 1E-112 > emb\|CAB10318.1\|(Z97338) HSR201 like protein [Arabidopsis |
| | | thaliana] Length = 446 |
| 359 | 2026359 | Tyr_Phospho_Site (96-102) |
| 360 | 2026360 | 2E-46 > dbj\|BAA34247\|(AB013853) GPI-anchored protein [Vigna radiata] |
| | | Length = 169 |
| 361 | 2026361 | 2E-89 > sp\|P35614\|ERF1_ARATH EUKARYOTIC PEPTIDE CHAIN RELEASE |
| | | FACTOR SUBUNIT 1 (ERF1) (OMNIPOTENT SUPPRESSOR PROTEIN 1 |
| | | HOMOLOG) (SUP1 HOMOLOG) > gi\|322554\|pir\|\|S31328 omnipotent suppressor |
| | | protein SUP1 homolog (clone G18) - Arabidopsis thaliana > |
| | | gi\|16514\|emb\|CAA49172\|(X69375) similar to yeast omnipotent suppressor |
| | | protein SUP1 (SUP45) [Arabidopsis thaliana] > gi\|1402882\|emb\|CAA66813\| |
| | | (X98130) eukaryotic early release factor subunit 1-like protein [Arabidopsis |
| | | thaliana] > gi\|1495249\|emb\|CAA66118\|(X97486) eRF1-3 [Arabidopsis thaliana] |
| | | Length = 435 |
| 362 | 2026362 | 6E-62 ) > gb\|AAD55787.1\|AF181966_1 (AF181966) methylenetetrahydrofolate |
| | | reductase MTHFR1 [Arabidopsis thaliana] Length = 592 |
| 363 | 2026363 | 7E-27 > sp\|P48347\|143E_ARATH 14-3-3-LIKE PROTEIN GF14 EPSILON > |
| | | gi\|1022778 (U36446) GF14 epsilon isoform [Arabidopsis thaliana] > |
| | | gi\|5802798\|gb\|AAD51785.1\|AF145302_1 (AF145302) 14-3-3 protein GF14 |
| | | epsilon [Arabidopsis thaliana] L |
| 364 | 2026364 | Pkc_Phospho_Site (6-8) |
| 365 | 2026365 | Pkc_Phospho_Site (22-24) |
| 366 | 2026366 | Pkc_Phospho_Site (16-18) |
| 367 | 2026367 | Pkc_Phospho_Site (25-27) |
| 368 | 2026368 | 1E-32 > sp\|P19177\|H2A_PETCR HISTONE H2A > gi\|100161\|pir\|\|S11498 |
| | | histone H2A - parsley > gi\|20448\|emb\|CAA37828\|(X53831) H2A histone protein |
| | | (AA 1 - 149) [Petroselinum crispum] Length = 149 |
| 369 | 2026369 | Tyr_Phospho_Site (819-825) |
| 370 | 2026370 | 3E-78 > pir\|\|S61555 xyloglucan endo-transglycosylase precursor - |
| | | Arabidopsis thaliana > gi\|944810\|dbj\|BAA09783\|(D63508) endo-xyloglucan |
| | | transferase [Arabidopsis thaliana] > gi\|5730137\|emb\|CAB52471.1\|(AL109796) |
| | | xyloglucan endo-1, 4-beta-D-glucanase precursor [Arabidopsis thaliana] Length = |
| | | 269 |
| 371 | 2026371 | 2E-69 > gi\|3850573 (AC005278) Similar to gi\|1652733 glycogen operon |
| | | protein GlgX from Synechocystis sp. genomegb\|D90908. ESTs gb\|H36690, |
| | | gb\|AA712462, gb\|AA651230 and gb\|N95932 come from this gene. [Arabidopsis |
| | | thaliana] Length = 882 |
| 372 | 2026372 | 1E-57 > sp\|P10797\|RBS3_ARATH RIBULOSE BISPHOSPHATE |
| | | CARBOXYLASE SMALL CHAIN 2B PRECURSOR (RUBISCO SMALL SUBUNIT |
| | | 2B) > gi\|68061\|pir\|\|RKMUB2 ribulose-bisphosphate carboxylase (EC 4.1.1.39) |
| | | small chain B2 precursor - Arabidopsis thaliana > gi\|16194\|emb\|CAA32701\| |
| | | (X14564) ribulose bisphosphate carboxylase [Arabidopsis thaliana] Length = 181 |
| 373 | 2026373 | Pkc_Phospho_Site (112-114) |
| 374 | 2026374 | 1E-113 > sp\|P28185\|ARA2_ARATH RAS-RELATED PROTEIN ARA-2 > |
| | | gi\|320559\|pir\|\|JS0639 GTP-binding protein ara-2 - Arabidopsis thaliana > |
| | | gi\|217835\|dbj\|BAA00829\|(D01024) small GTP-binding protein [Arabidopsis |
| | | thaliana] Length = 216 |
| 375 | 2026375 | 3′ Pkc_Phospho_Site (14-16) |
| 376 | 2026376 | 5′ Pkc_Phospho_Site (46-48) |
| 377 | 2026377 | 5′ Tyr_Phospho_Site (767-774) |
| 378 | 2026378 | 5′ 2E-74 > gi\|3415115 (AF081202) villin 2 [Arabidopsis thaliana] Length = |
| | | 976 |
| 379 | 2026379 | Tyr_Phospho_Site (428-436) |
| 380 | 2026380 | Tyr_Phospho_Site (302-308) |
| 381 | 2026381 | 3E-85 > gi\|4206789 (AF112864) syntaxin-related protein At-SYR1 |
| | | [Arabidopsis thaliana] Length = 346 |
| 382 | 2026382 | Tyr_Phospho_Site (382-389) |
| 383 | 2026383 | 8E-29 > gb\|AAD35977.1\|AE001754_14 (AE001754) galactose-1-phosphate |
| | | uridylyltransferase, [Thermotoga maritima] Length = 336 |
| 384 | 2026384 | Tyr_Phospho_Site (742-749) |
| 385 | 2026385 | Tyr_Phospho_Site (258-266) |
| 386 | 2026386 | 1E-74 ) > gi\|1628583 (U66916) 12S cruciferin seed storage protein |
| | | [Arabidopsis thaliana] > gi\|2842495\|emb\|CAA16892.1\|(AL021749) 12S cruciferin |
| | | seed storage protein [Arabidopsis thaliana] Length = 524 |
| 387 | 2026387 | 6E-41 > sp\|O04885\|LGUL_BRAJU LACTOYLGLUTATHIONE LYASE |
| | | (METHYLGLYOXALASE) (ALDOKETOMUTASE) (GLYOXALASE I) (GLX I) |
| | | (KETONE-ALDEHYDE MUTASE) (S-D-LACTOYLGLUTATHIONE |
| | | METHYLGLYOXAL LYASE) > gi\|2113825\|emb\|CAA73691.1\|(Y13239) Glyoxalase |
| | | I [Brassica juncea] Length = 185 |
| 388 | 2026388 | 7E-53 > gi\|2388582 (AC000098) Contains similarity to Rattus O-GlcNAc |
| | | transferase (gb\|U76557). [Arabidopsis thaliana] Length = 808 |
| 389 | 2026389 | Tyr_Phospho_Site (763-770) |
| 390 | 2026390 | 4E-18 > gi\|3540185 (AC004122) Highly Similar to branched-chain amino |
| | | acid aminotransferase [Arabidopsis thaliana] Length = 384 |
| 391 | 2026391 | 4E-69 > emb\|CAB53651.1\|(AL110123) ribosomal protein L32-like protein |
| | | [Arabidopsis thaliana] Length = 133 |
| 392 | 2026392 | 3′ 2E-31 > gi\|4688596\|emb\|CAB41466.1\|(AJ005682) inositol 1,4,5- |
| | | trisphosphate 5-phosphatase [Arabidopsis thaliana] Length = 1101 |
| 393 | 2026393 | 3′ 1E-14 > gi\|4263819\|gb\|AAD15462\|(AC006067) serpin protein [Arabidopsis |
| | | thaliana] Length = 407 |
| 394 | 2026394 | 5′ 5E-61 > gi\|320552\|pir\|\|JQ1684 anthranilate synthase (EC 4.1.3.27) alpha-1 |
| | | chain - Arabidopsis thaliana Length = 595 |
| 395 | 2026395 | 5′ Pkc_Phospho_Site (38-40) |
| 396 | 2026396 | 5′ Tyr_Phospho_Site (101-108) |
| 397 | 2026397 | 8E-11 > gb\|AAC78704.1\|(AF001308) predicted glycosyl transferase |
| | | [Arabidopsis thaliana] Length = 346 |
| 398 | 2026398 | 1E-15 > pir\|\|S44261 SRG1 protein - Arabidopsis thaliana > |
| | | gi\|479047\|emb\|CAA55654\|(X79052) SRG1 [Arabidopsis thaliana] > |
| | | gi\|5734767\|gb\|AAD50032.1\|AC007651_27 (AC007651) SRG1 Protein |
| | | [Arabidopsis thaliana] Length = 358 |
| 399 | 2026399 | Pkc_Phospho_Site (13-15) |
| 400 | 2026400 | 2E-23 > emb\|CAB52267.1\|(AL109739) trp-asp repeat protein |
| | | [Schizosaccharomyces pombe] Length = 507 |
| 401 | 2026401 | Tyr_Phospho_Site (255-261) |
| 402 | 2026402 | 1E-67 > pir\|\|S53490 RNA-binding protein cp29 precursor - Arabidopsis |
| | | thaliana > gi\|681902\|dbj\|BAA06518\|(D31710) cp29 [Arabidopsis thaliana] Length = |
| | | 334 |
| 403 | 2026403 | Tyr_Phospho_Site (203-209) |
| 404 | 2026404 | 1E-103 > sp\|Q39085\|DIM_ARATH CELL ELONGATION PROTEIN DIMINUTO |
| | | (CELL ELONGATION PROTEIN DWARF1) > gi\|602302 (L38520) diminuto |
| | | [Arabidopsis thaliana] Length = 561 |
| 405 | 2026405 | Tyr_Phospho_Site (454-460) |
| 406 | 2026406 | 2E-61 ) > gi\|3335340 (AC004512) Strong similarity to xylglucan endo- |
| | | transglycolsylase (TCH4) genegb\|U27609, first exon contains strong similarity to |
| | | meri 5 genegb\|Z17989 from A. thaliana. EST gb\|N37583 comes from thi |
| 407 | 2026407 | 2E-99 > sp)P41916\|RAN1_ARATH GTP-BINDING NUCLEAR PROTEIN RAN-1 > |
| | | gi\|495729 (L16789) small ras-related protein [Arabidopsis thaliana] > |
| | | gi\|2058278\|emb\|CAA66047\|(X97379) atranl [Arabidopsis thaliana] Length = 221 |
| 408 | 2026408 | Tyr_Phospho_Site (480-486) |
| 409 | 2026409 | 2E-73 > sp\|O22899\|DD15_ARATH PRE-MRNA SPLICING FACTOR ATP- |
| | | DEPENDENT RNA HELICASE > gi\|2275203 (AC002337) RNA helicase isolog |
| | | [Arabidopsis thaliana] Length = 729 |
| 410 | 2026410 | Tyr_Phospho_Site (691-699) |
| 411 | 2026411 | 5E-79 ) > emb\|CAA66821\|(X98130) alpha-mannosidase [Arabidopsis |
| | | thaliana] > gi\|1890154\|emb\|CAA72432\|(Y11767) alpha-mannosidase precursor |
| | | [Arabidopsis thaliana] Length = 1019 |
| 412 | 2026412 | 1E-46 > gi\|1002803 (U33932) flavanone 3-hydroxylase [Arabidopsis |
| | | thaliana] Length = 358 |
| 413 | 2026413 | 1E-64 ) > sp\|P23321\|PSBO_ARATH OXYGEN-EVOLVING ENHANCER |
| | | PROTEIN 1 PRECURSOR (OEE1) (33 KD SUBUNIT OF OXYGEN EVOLVING |
| | | SYSTEM OF PHOTOSYSTEM II) (33 KD THYLAKOID MEMBRANE PROTEIN) > |
| | | gi\|99745\|pir\|\|S11852 photosystem II oxygen-evolving complex protein 1 |
| | | precursor - Arabidopsis thaliana > gi\|22571\|emb\|CAA36675\|(X52428) 33 kDa |
| | | oxygen-evolving protein [Arabidopsis thaliana] Length = 332 |
| 414 | 2026414 | 3E-52 > gi\|3687237 (AC005169) Cys3His zinc-finger protein [Arabidopsis |
| | | thaliana] Length = 359 |
| 415 | 2026415 | 1E-46 > gi\|2827139 (AF027172) cellulose synthase catalytic subunit |
| | | [Arabidopsis thaliana] > gi\|4049343\|emb\|CAA22568.1\|(AL034567) cellulose |
| | | synthase catalytic subunit (RSW1) [Arabidopsis thaliana] Length = 1081 |
| 416 | 2026416 | 3′ Tyr_Phospho_Site (366-373) |
| 417 | 2026417 | 3′ Pkc_Phospho_Site (117-119) |
| 418 | 2026418 | 3′ 5E-89 > gi\|1345132 (U47029) ERECTA [Arabidopsis thaliana] > |
| | | gi\|1389566\|dbj\|BAA11869\|(D83257) receptor protein kinase [Arabidopsis |
| | | thaliana] > gi\|3075386 (AC004484) receptor protein kinase, ERECTA [Arabidopsis |
| | | thaliana] Length = 976 |
| 419 | 2026419 | 5′ 2E-82 > gi\|5931647\|emb\|CAB56577.1\|(AJ011625) squamosa promoter |
| | | binding protein-like 2 [Arabidopsis thaliana] Length = 425 |
| 420 | 2026420 | 5′ 2E-46> gi\|5915848\|sp\|O23051\|C883_ARATH CYTOCHROME P450 88A3 > |
| | | gi\|2388581 (AC000098) Similar to Zea DWARF3 (gb\|U32579). [Arabidopsis |
| | | thaliana] Length = 490 |
| 421 | 2026421 | 5′ 3E-73 > gi\|1076344\|pir\|\|A55174 kinase-associated protein phosphatase |
| | | precursor - Arabidopsis thaliana Length = 582 |
| 422 | 2026422 | 5′ 4E-41 > gi\|6094274\|sp\|O23969\|SF21_HELAN POLLEN SPECIFIC PROTEIN |
| | | SF21 > gi\|2655926\|emb\|CAA70260\|(Y09057) sf21 [Helianthus annuus] Length = |
| | | 352 |
| 423 | 2026423 | Pkc_Phospho_Site (60-62) |
| 424 | 2026424 | 6E-27 > gb\|AAA02747.1\|(L13655) membrane protein [Saccharum hybrid |
| | | cultivar H65-7052] Length = 325 |
| 425 | 2026425 | 1E-74 > gb\|AAD50025.1\|AC007651_20 (AC007651) Very similar to prenyl |
| | | transferase [Arabidopsis thaliana] Length = 379 |
| 426 | 2026426 | Pkc_Phospho_Site (151-153) |
| 427 | 2026427 | 5E-89 > gi\|3152595 (AC002986) Similar to D. melanogaster sno gene |
| | | gb\|U95760. EST gb\|N97148 and gb\|Z26221 come from this gene. [Arabidopsis |
| | | thaliana] Length = 1257 |
| 428 | 2026428 | 2E-11 > sp\|P42730\|H101_ARATH HEAT SHOCK PROTEIN 101 > gi\|537446 |
| | | (U13949) AtHSP101 [Arabidopsis thaliana] Length = 911 |
| 429 | 2026429 | 2E-18 > emb\|CAA17786\|(AL022070) autophagocytosis protein |
| | | [Schizosaccharomyces pombe] Length = 275 |
| 430 | 2026430 | Tyr_Phospho Site (25-33) |
| 431 | 2026431 | Tyr_Phospho Site (38-44) |
| 432 | 2026432 | 9E-91 > gi\|3242708 (AC003040) serine/threonine protein kinase |
| | | [Arabidopsis thaliana] Length = 694 |
| 433 | 2026433 | Tyr_Phospho_Site (890-897) |
| 434 | 2026434 | 9E-55 > gi\|2160168 (AC000132) Strong similarity to R. communis |
| | | phosphoglycerate mutase (gb\|X70652). ESTs gb\|T41853,gb\|T76648 come from |
| | | this gene. [Arabidopsis thaliana] Length = 575 |
| 435 | 2026435 | 3E-29 > dbj\|BAA16245\|(D90867) OXALYL-COA DECARBOXYLASE (EC |
| | | 4.1.1.8). [Escherichia coli] Length = 455 |
| 436 | 2026436 | Tyr_Phospho_Site (152-159) |
| 437 | 2026437 | 4E-33 > gb\|AAC36698\|(AF075580) protein phosphatase-2C; PP2C |
| | | [Mesembryanthemum crystallinum] Length = 359 |
| 438 | 2026438 | 2E-17 > gb\|AAD19002\|(AE001667) predicted pseudouridine synthase |
| | | [Chlamydia pneumoniae] Length = 235 |
| 439 | 2026439 | Tyr_Phospho_Site (4-12) |
| 440 | 2026440 | 7E-49 > sp\|P25697\|KPPR_ARATH PHOSPHORIBULOKINASE PRECURSOR |
| | | (PHOSPHOPENTOKINASE) (PRKASE) (PRK) > gi\|99744\|pir\|\|S16583 |
| | | phosphoribulokinase (EC 2.7.1.19) precursor - Arabidopsis thaliana > |
| | | gi\|16441\|emb\|CAA41155\|(X58149) Ribulose-5 |
| 441 | 2026441 | Tyr_Phospho_Site (4-11) |
| 442 | 2026442 | Tyr_Phospho_Site (808-815) |
| 443 | 2026443 | Tyr_Phospho_Site (981-989) |
| 444 | 2026444 | 2E-89 > pir\|\|S71367 small nuclear ribonucleoprotein - Arabidopsis thaliana > |
| | | gi\|2129756\|pir\|\|S71411 U1 snRNP 70K protein - Arabidopsis thaliana > |
| | | gi\|1255711 (M93439) small nuclear ribonucleoprotein [Arabidopsis thaliana] > |
| | | gi\|1354469 (U52909) U1 snRNP 70K protein [Arabidopsis thaliana] Length = 427 |
| 445 | 2026445 | 3E-79 > emb\|CAB10243.1\|(Z97336) calmodulin [Arabidopsis thaliana] > |
| | | gi\|5825600\|gb\|AAD53314.1\|AF178074_1 (AF178074) calmodulin 8 [Arabidopsis |
| | | thaliana] Length = 151 |
| 446 | 2026446 | 3′ 3E-50 > gi\|1170169\|sp\|P46601\|HAT2_ARATH HOMEOBOX-LEUCINE |
| | | ZIPPER PROTEIN HAT2 (HD-ZIP PROTEIN 2) > gi\|549886 (U09335) homeobox |
| | | protein [Arabidopsis thaliana] Length = 208 |
| 447 | 2026447 | 5′ Rgd (3-5) |
| 448 | 2026448 | 5′ Tyr_Phospho_Site (160-168) |
| 449 | 2026449 | 3E-17 > pir\|\|S66569 biotin carboxyl carrier protein (clone BP6) - rape > |
| | | gi\|1070008\|emb\|CAA62265\|(X90731) Biotin carboxyl carrier protein [Brassica |
| | | napus] > gi\|1589044\|prf\|\|2210244E Ac-CoA carboxylase:ISOTYPE = bp6 [Brassica |
| | | napus] Length = 251 |
| 450 | 2026450 | 9E-45 > gb\|AAC25423.1\|(AF072908) calcium-dependent protein kinase |
| | | [Nicotiana tabacum] Length = 540 |
| 451 | 2026451 | Pkc_Phospho_Site (152-154) |
| 452 | 2026452 | Pkc_Phospho_Site (80-82) |
| 453 | 2026453 | 6E-26 > dbj\|BAA77837.1\|(AB027458) ACE [Arabidopsis thaliana] > |
| | | gi\|5903086\|gb\|AAD55644.1\|AC008017_17 (AC008017) ACE [Arabidopsis |
| | | thaliana] Length = 594 |
| 454 | 2026454 | 3E-29 > emb\|CAA09195\|(AJ010456) RNA helicase [Arabidopsis thaliana] |
| | | Length = 391 |
| 455 | 2026455 | 4E-73 > dbj\|BAA06311\|(D30622) novel serine/threonine protein kinase |
| | | [Arabidopsis thaliana] Length = 421 |
| 456 | 2026456 | 2E-71 ) > sp\|P11105\|H32_MEDSA HISTONE H3.2, MINOR > |
| | | gi\|282871\|pir\|\|S24346 histone H3.3-like protein - Arabidopsis thaliana > |
| | | gi\|16324\|emb\|CAA42957\|(X60429) histone H3.3 like protein [Arabidopsis |
| | | thaliana] > gi\|404825\|emb\|CAA42958 |
| 457 | 2026457 | Pkc_Phospho_Site (15-17) |
| 458 | 2026458 | 7E-63 > pir\|\|S54257 sulfite reductase (ferredoxin) (EC 1.8.7.1) precursor - |
| | | Arabidopsis thaliana > gi\|2129745\|pir\|\|S71437 sulfite reductase (ferredoxin) (EC |
| | | 1.8.7.1) precursor - Arabidopsis thaliana > gi\|804953\|emb\|CAA89 |
| 459 | 2026459 | 7E-78 ) > pir\|\|C49539 endoxyloglucan transferase - Arabidopsis thaliana > |
| | | gi\|469484\|dbj\|BAA03921\|(D16454) endo-xyloglucan transferase [Arabidopsis |
| | | thaliana] > gi\|4063757 (AC005561) endo-xyloglucan transferase [Arabidopsis |
| | | thaliana] > gi\|5533309\|gb\|AAD45123.1 \|AF163819_1 (AF163819) endoxyloglucan |
| | | transferase [Arabidopsis thaliana] Length = 296 |
| 460 | 2026460 | Pkc_Phospho_Site (19-21) |
| 461 | 2026461 | 3′ Pkc_Phospho_Site (55-57) |
| 462 | 2026462 | 5′ Zinc Finger C2h2 (837-861) |
| 463 | 2026463 | 5′ 2E-95> gi\|4204912 (U58918) MEK kinase [Arabidopsis thaliana] |
| | | Length = 608 |
| 464 | 2026464 | 5′ 5E-28 > gi\|481812\|pir\|\|S39484 DNA-binding protein GT-2 - Arabidopsis |
| | | thaliana > gi\|416490\|emb\|CAA51289\|(X72780) GT-2 factor [Arabidopsis thaliana] |
| | | Length = 575 |
| 465 | 2026465 | 9E-28 > gi\|3236253 (AC004684) receptor-like protein kinase [Arabidopsis |
| | | thaliana] Length = 675 |
| 466 | 2026466 | Tyr_Phospho_Site (547-555) |
| 467 | 2026467 | Rgd (371-373) |
| 468 | 2026468 | 7E-78 > gi\|3047117 (AF058919) similar to ATP-dependent RNA helicases |
| | | [Arabidopsis thaliana] Length = 499 |
| 469 | 2026469 | Pkc_Phospho_Site (49-51) |
| 470 | 2026470 | 5E-72 > gi\|4103987 (AF030516) 5,10-methylenetetrahydrofolate |
| | | dehydrogenase-5,10-methenyltetrahydrofolate cyclohydrolase [Pisum sativum] > |
| | | gi\|6002383\|emb\|CAB56756.1\|(AJ011589) 5,10-methylenetetrahydrofolate |
| | | dehydrogenase: 5,10-methenyltetrahydrofolate cyclohydrolase [Pisum sativum] |
| | | Length = 294 |
| 471 | 2026471 | Pkc_Phospho_Site (7-9) |
| 472 | 2026472 | 6E-59 > emb\|CAA74002\|(Y13651) homologous to GATA-binding |
| | | transcription factors [Arabidopsis thaliana] Length = 240 |
| 473 | 2026473 | 1E-109 > pir\|\|S71215 cellulase homolog OR16pep - Arabidopsis thaliana > |
| | | gi\|1022807\|gb\|AAB60304.1\|(U37702) cellulase [Arabidopsis thaliana] > |
| | | gi\|3493633 (AF074092) cellulase [Arabidopsis thaliana] > gi\|3598956 (AF074375) |
| | | c |
| 474 | 2026474 | Pkc_Phospho_Site (58-60) |
| 475 | 2026475 | 1E-131 > gi\|4204270 (AC005223) branched-chain alpha-keto acid |
| | | decarboxylase E1 beta subunit [Arabidopsis thaliana] Length = 352 |
| 476 | 2026476 | 2E-81 > gb\|AAD40139.1 \|AF149413_20 (AF149413) similar to malate |
| | | dehydrogenases; Pfam PF00390, Score = 1290.5. E = 0, N = 1 [Arabidopsis thaliana] |
| | | Length = 588 |
| 477 | 2026477 | 5E-79 > sp\|P28186\|ARA3_ARATH RAS-RELATED PROTEIN ARA-3 > |
| | | gi\|320560\|pir\|\|JS0640 GTP-binding protein ara-3 - Arabidopsis thaliana > |
| | | gi\|217837\|dbj\|BAA00830\|(D01025) small GTP-binding protein [Arabidopsis |
| | | thaliana] Length = 216 |
| 478 | 2026478 | 1E-48 > gb\|AAD23019.1\|AC006585_14 (AC006585) steroid binding protein |
| | | [Arabidopsis thaliana] Length = 100 |
| 479 | 2026479 | 2E-36 > gb\|AAD25151.1\|AC006420_6 (AC006420) photosystem II protein X |
| | | precursor [Arabidopsis thaliana] Length = 116 |
| 480 | 2026480 | 8E-52 > pir\|\|S52421 amine acid permease - Arabidopsis thaliana > |
| | | gi\|510236\|emb\|CAA50672\|(X71787) amine acid permease [Arabidopsis thaliana] |
| | | Length = 493 |
| 481 | 2026481 | 2E-18 > gi\|4249418 (AC006072) zinc-finger protein (C-x8-C-x5-C-x3-H |
| | | type domains), 5′ partial [Arabidopsis thaliana] Length = 342 |
| 482 | 2026482 | 1E-90 > gi\|2865462 (AF043130) lactate dehydrogenase [Arabidopsis |
| | | thaliana] Length = 353 |
| 483 | 2026483 | 3′ Pkc_Phospho_Site (39-41) |
| 484 | 2026484 | 5′ Pkc_Phospho_Site (136-138) |
| 485 | 2026485 | 5′ Pkc_Phospho_Site (46-48) |
| 486 | 2026486 | 5′ 9E-91 > gi\|4432860\|gb\|AAD20708\|(AC006300) glucose-induced repressor |
| | | protein [Arabidopsis thaliana] Length = 628 |
| 487 | 2026487 | 5′ 7E-15 > gi\|5923683\|gb\|AAD56334.1\|AC009326_21 (AC009326) lectin |
| | | [Arabidopsis thaliana] Length = 313 |
| 488 | 2026488 | Tyr_Phospho_Site (690-698) |
| 489 | 2026489 | Pkc_Phospho_Site (12-14) |
| 490 | 2026490 | 6E-72 > gb\|AAD32905.1\|AC007584_3 (AC007584) Mlo protein [Arabidopsis |
| | | thaliana] Length = 574 |
| 491 | 2026491 | Pkc_Phospho_Site (2-4) |
| 492 | 2026492 | Pkc_Phospho_Site (13-15) |
| 493 | 2026493 | 1E-54 (AF141375) protodermal factor 1 [Arabidopsis thaliana] > |
| | | gi\|4929130\|gb\|AAD33869.1\|AF141376_1 (AF141376) protodermal factor 1 |
| | | [Arabidopsis thaliana] Length = 306 |
| 494 | 2026494 | 1E-17 > pir\|\|S46537 pathogen-inducible protein CXc750 precursor - |
| | | Arabidopsis thaliana > gi\|457716\|emb\|CAA50905\|(X72022) ORF1 [Arabidopsis |
| | | thaliana] Length = 95 |
| 495 | 2026495 | 2E-99 > sp\|P49967\|SR53_ARATH SIGNAL RECOGNITION PARTICLE 54 KD |
| | | PROTEIN 3 (SRP54) > gi\|515681 (U12127) signal recognition particle 54 kDa |
| | | subunit [Arabidopsis thaliana] Length = 495 |
| 496 | 2026496 | 1E-40 > gi\|2088643 (AF002109) transcription factor SF3 isolog |
| | | [Arabidopsis thaliana] Length = 200 |
| 497 | 2026497 | 3E-41 > gi\|3033375 (AC004238) berberine bridge enzyme [Arabidopsis |
| | | thaliana] Length = 532 |
| 498 | 2026498 | 9E-64 > sp\|P04796\|G3PC_SINAL GLYCERALDEHYDE 3-PHOSPHATE |
| | | DEHYDROGENASE, CYTOSOLIC > gi\|66011\|pir\|\|DEIS3C glyceraldehyde-3- |
| | | phosphate dehydrogenase (EC 1.2.1.12), cytosolic - white mustard > |
| | | gi\|21143\|emb\|CAA27844\|(X04301) GAPDH (aa 1-338) [Sinapis alba] Length = |
| | | 338 |
| 499 | 2026499 | 5E-51 > sp\|P51419\|RL27_ARATH 60S RIBOSOMAL PROTEIN L27 > |
| | | gi\|2244857\|emb\|CAB10279.1\|(Z97337) ribosomal protein [Arabidopsis thaliana] |
| | | Length = 135 |
| 500 | 2026500 | 3′ Pkc_Phospho_Site (68-70) |
| 501 | 2026501 | 3′ Tyr_Phospho_Site (458-464) |
| 502 | 2026502 | 5′ 4E-14 > gi\|3766368\|emb\|CAA21420\|(AL031907) trascription factor, ccr4- |
| | | associated factor homolog [Schizosaccharomyces pombe] Length = 332 |
| 503 | 2026503 | 5′ Tyr_Phospho_Site (857-864) |
| 504 | 2026504 | 5′ 1E-68 > gi\|2499607\|sp\|Q39023\|MPK3_ARATH MITOGEN-ACTIVATED |
| | | PROTEIN KINASE HOMOLOG 3 (MAP KINASE 3) (ATMPK3) > |
| | | gi\|629544\|pir\|\|S40469 mitogen-activated protein kinase 3 (EC 2.7.1.-) - |
| | | Arabidopsis thaliana > gi\|457398\|dbj\|BAA04866\|(D21839) MAP kinase |
| | | [Arabidopsis thaliana] Length = 370 |
| 505 | 2026505 | 5′ 8E-43 > gi\|5915830\|sp\|Q96514\|C7B7_ARATH CYTOCHROME P450 71B7 > |
| | | gi\|1523796\|emb\|CAA66458\|(X97864) cytochrome P450 [Arabidopsis thaliana] > |
| | | giJ4850394\|gb\|AAD31064.1JAC007357_13 (AC007357) Identical to gb\|X97864 |
| | | cytochrome P450 from Arabidopsis thaliana and is a member of the PF\|00067 |
| | | Cytochrome |
| 506 | 2026506 | 5′ 4E-57 > gi\|4337196\|gb\|AAD18110\|(AC006403) serine/threonine receptor |
| | | kinase [Arabidopsis thaliana] Length = 816 |
| 507 | 2026507 | 5′ Tyr_Phospho_Site (363-370) |
| 508 | 2026508 | 5′ Rgd (121-123) |
| 509 | 2026509 | 5′ Pkc_Phospho_Site (45-47) |
| 510 | 2026510 | 5′ 6E-22 > gi\|4218120\|emb\|CAA22974.1\|(AL035353) Proline-rich APG-like |
| | | protein [Arabidopsis thaliana] Length = 367 |
| 511 | 2026511 | 5′ 7E-89 > gi\|3015514 (U72351) ADPG pyrophosphorylase small |
| | | subunit [Arabidopsis thaliana] Length = 520 |
| 512 | 2026512 | 2E-56 ) > sp\|P49692\|RL7A_ARATH 60S RIBOSOMAL PROTEIN L7A > |
| | | gi\|2529665 (AC002535) ribosomal protein L7A [Arabidopsis thaliana] Length = |
| | | 257 |
| 513 | 2026513 | Tyr_Phospho_Site (563-570) |
| 514 | 2026514 | Pkc_Phospho_Site (77-79) |
| 515 | 2026515 | 6E-55 > sp\|P56707\|SMTA_ASTBI SELENOCYSTEINE |
| | | METHYLTRANSFERASE (SECYS-METHYLTRANSFERASE) (SECYS-MT) > |
| | | gi\|4006848\|emb\|CAA10368\|(AJ131433) selenocysteine methyltransferase |
| | | [Astragalus bisulcatus] Length = 338 |
| 516 | 2026516 | 1E-94 > sp\|Q39219\|AX1A_ARATH ALTERNATIVE OXIDASE 1A PRECURSOR > |
| | | gi\|2506083\|dbj\|BAA22625\|(D89875) alternative oxidase [Arabidopsis thaliana] |
| | | Length = 354 |
| 517 | 2026517 | 1E-41 > gi\|3128189 (AC004521) beta-glucosidase [Arabidopsis thaliana] |
| | | Length = 591 |
| 518 | 2026518 | 7E-14 > gi\|940288 (L43510) protein localized in the nucleoli of pea |
| | | nuclei; ORF; [Pisum sativum] Length = 611 |
| 519 | 2026519 | 3E-82 > gi\|3776579 (AC005388) Strong similarity to F22O13.22 |
| | | gi\|3063460 myosin homolog from A. thaliana BAC gb\|AC003981. [Arabidopsis |
| | | thaliana] Length = 1556 |
| 520 | 2026520 | 2E-55 ) > gi\|2997686 (AF053303) transcriptional co-activator |
| | | [Arabidopsis thaliana] > gi\|3513735 (AF080118) contains similarity to RNA |
| | | polymerase II transcription cofactor p15 [Arabidopsis thaliana] > gi\|4539366 |
| 521 | 2026521 | 1E-87 ) > gb\|AAD51616.1\|AF166262_1 (AF166262) HAL3A protein [Arabidopsis |
| | | thaliana] Length = 209 |
| 522 | 2026522 | 6E-24 > pir\|\|S71280 photosystem II chain T - Arabidopsis thaliana Length = |
| | | 102 |
| 523 | 2026523 | 3E-21 > gb\|AAD43920.1\|AF130441_1 (AF130441) UVB-resistance protein UVR8 |
| | | [Arabidopsis thaliana] Length = 440 |
| 524 | 2026524 | Pkc_Phospho_Site (111-113) |
| 525 | 2026525 | 5E-43 > gb\|AAD39640.1\|AC007591_5 (AC007591 ) Similar to gb\|X79273 |
| | | cytochrome c reductase hinge protein subunit from Solanum tuberosum. ESTs |
| | | gb\|T45282 and gb\|T21596 come from this gene. [Arabidopsis thaliana] Length = |
| | | 101 |
| 526 | 2026526 | 4E-47 > sp\|Q96529\|PURA_ARATH ADENYLOSUCCINATE SYNTHETASE |
| | | PRECURSOR (IMP-ASPARTATE LIGASE) > gi\|1616657 (U49389) |
| | | adenylosuccinate synthetase [Arabidopsis thaliana] > |
| | | gi\|4678286\|emb\|CAB41194.1\|(AL049660) adenylosuccinate synthetase |
| | | [Arabidopsis thaliana] Length = 490 |
| 527 | 2026527 | 1E-84 > gb\|AAD15390\|(AC006223) sugar starvation-induced protein |
| | | [Arabidopsis thaliana] Length = 256 |
| 528 | 2026528 | 3E-77 > gb\|AAD49995.1\|AC007259_8 (AC007259) glucose transporter |
| | | [Arabidopsis thaliana] Length = 522 |
| 529 | 2026529 | Tyr_Phospho_Site (929-935) |
| 530 | 2026530 | 9E-65 > gb\|AAD12260.1\|(AF098632) subtilisin-like protease [Arabidopsis |
| | | thaliana] Length = 772 |
| 531 | 2026531 | 1E-45 > sp\|P52407\|E13B_HEVBR GLUCAN ENDO-1.3-BETA-GLUCOSIDASE, |
| | | BASIC VACUOLAR ISOFORM PRECURSOR ((1->3)-BETA-GLUCAN |
| | | ENDOHYDROLASE) ((1->3)-BETA-GLUCANASE) (BETA-1,3- |
| | | ENDOGLUCANASE) > gi\|2129912\|pir\|\|S65077 beta-1,3-glucanase class I |
| | | precursor - Para rubber tree > gi\|1184668 (U22147) beta-1,3-glucanase [Hevea |
| | | brasiliensis] Length = 374 |
| 532 | 2026532 | 3′ 3E-33 > gi\|4490323\|emb\|CAB38706.1\|(AJ131464) nitrate transporter |
| | | [Arabidopsis thaliana] Length = 567 |
| 533 | 2026533 | 3′ 4E-57 > gi\|629562\|pir\|\|S44943 sulfate adenylyltransferase (EC 2.7.7.4) - |
| | | Arabidopsis thaliana > gi\|2129743\|pir\|\|S68024 sulfate adenylyltransferase (EC |
| | | 2.7.7.4) precursor (clone APS2) - Arabidopsis thaliana > |
| | | gi\|487404\|emb\|CAA55799\|(X79210) sulfate adenylyltransferase [Arabidopsis |
| | | thaliana] |
| 534 | 2026534 | 5′ 5E-21 > gi\|3334437\|sp\|P77399\|YFCX_ECOLI FATTY OXIDATION |
| | | COMPLEX ALPHA SUBUNIT [INCLUDES: ENOYL-COA HYDRATASE; 3- |
| | | HYDROXYACYL-COA DEHYDROGENASE; 3-HYDROXYBUTYRYL-COA |
| | | EPIMERASE ] > gi\|1788682 (AE000322) enzyme [Escherichia coli] > |
| | | gi\|1799732\|dbj\|BAA16195\|(D90864) MITOCHONDRIA |
| 535 | 2026535 | 5′ Ww_Domain_1 (464-489) |
| 536 | 2026536 | 5′ 5E-42 > gi\|2811029\|sp\|O04866\|ARGD_ALNGL ACETYLORNITHINE |
| | | AMINOTRANSFERASE PRECURSOR (ACOAT) (ACETYLORNITHINE |
| | | TRANSAMINASE) (AOTA) > gi\|1944511\|emb\|CAA69936\|(Y08680) acetylornithine |
| | | aminotransferase [Alnus glutinosa] Length = 451 |
| 537 | 2026537 | Tyr_Phospho_Site (631-639) |
| 538 | 2026538 | 4E-36 > emb\|CAB38807.1\|(AL035678) nucellin-like protein [Arabidopsis |
| | | thaliana] Length = 420 |
| 539 | 2026539 | Pkc_Phospho_Site (2-4) |
| 540 | 2026540 | 8E-68 > emb\|CAB43701.1\|(AL050400) beta-carotene hydroxylase |
| | | [Arabidopsis thaliana] Length = 310 |
| 541 | 2026541 | 2E-56 > gi\|2739389 (AC002505) Cf-2.2 like protein [Arabidopsis thaliana] |
| | | Length = 480 |
| 542 | 2026542 | 2E-90 > gi\|3395938 (AF076924) polypyrimidine tract-binding protein |
| | | homolog [Arabidopsis thaliana] Length = 418 |
| 543 | 2026543 | Tyr_Phospho_Site (547-554) |
| 544 | 2026544 | 4E-86 > emb\|CAB10335.1\|(Z97339) SEN1 like protein [Arabidopsis thaliana] |
| | | Length = 555 |
| 545 | 2026545 | Tyr_Phospho_Site (297-305) |
| 546 | 2026546 | 2E-90 > gb\|AAD37122.1\|AF129511_1 (AF129511) very-long-chain fatty acid |
| | | condensing enzyme CUT1 [Arabidopsis thaliana] Length = 497 |
| 547 | 2026547 | Tyr_Phospho_Site (532-540) |
| 548 | 2026548 | 1E-37 > emb\|CAA16683\|(AL021684) lysosomal Pro-X carboxypeptidase - |
| | | like protein [Arabidopsis thaliana] Length = 499 |
| 549 | 2026549 | 1E-36 > gi\|1262292 (U51683) LpxD [Brucella abortus] Length = 351 |
| 550 | 2026550 | Receptor_Cytokines_1 (159-171) |
| 551 | 2026551 | 5E-55 > gi\|1209703 (U40489) maizeg\|1 homolog [Arabidopsis thaliana] |
| | | Length = 625 |
| 552 | 2026552 | 1E-57 > gb\|AAF00658.1\|AC008153_10 (AC008153) transcription factor |
| | | [Arabidopsis thaliana] Length = 553 |
| 553 | 2026553 | 9E-90 > pir\|\|S26605 transforming protein (myb) homolog (clone myb.Ph3) - |
| | | garden petunia > gi\|20563\|emb\|CAA78386\|(Z13996) protein 1 [Petunia x hybrida] |
| | | Length = 421 |
| 554 | 2026554 | Tyr_Phospho_Site (329-335) |
| 555 | 2026555 | 6E-59 ) > sp\|O23290\|RL44_ARATH 60S RIBOSOMAL PROTEIN L44 > |
| | | gi\|2244789\|emb\|CAB10211.1\|(Z97336) ribosomal protein [Arabidopsis thaliana] |
| | | Length = 105 |
| 556 | 2026556 | 1E-35 > sp\|P14712\|PHYA_ARATH PHYTOCHROME A > gi\|404670 (L21154) |
| | | phytochrome A [Arabidopsis thaliana] > gi\|3482934 (AC003970) phytochrome A |
| | | [Arabidopsis thaliana] Length = 1122 |
| 557 | 2026557 | Tyr_Phospho_Site (376-383) |
| 558 | 2026558 | 6E-31 > emb\|CAA07232.1\|(AJ006766) Pi starvation-induced protein [Cicer |
| | | arietinum] Length = 129 |
| 559 | 2026559 | 3′ 7E-38 > gi\|4006850\|emb\|CAB16768.1\|(Z99707) cytochrome like protein |
| | | [Arabidopsis thaliana] Length = 185 |
| 560 | 2026560 | 3′ Tyr_Phospho_Site (279-285) |
| 561 | 2026561 | 5′ Tyr_Phospho_Site (287-294) |
| 562 | 2026562 | 5′ Pkc_Phospho_Site (38-40) |
| 563 | 2026563 | 5′ Pkc_Phospho_Site (18-20) |
| 564 | 2026564 | 5′ Pkc_Phospho_Site (103-105) |
| 565 | 2026565 | 5′ 5E-85 > gi\|4006896\|emb\|CAB1 6826.1\|(Z99708) SCARECROW-like protein |
| | | [Arabidopsis thaliana] Length = 486 |
| 566 | 2026566 | 6E-62 > gb\|AAD39570.1\|AC007067_10 (AC007067) T10O24.10 [Arabidopsis |
| | | thaliana] Length = 1058 |
| 567 | 2026567 | 1E-58 > sp\|P49641\|MA2X_HUMAN ALPHA-MANNOSIDASE IIX (MANNOSYL- |
| | | OLIGOSACCHARIDE 1,3-1,6-ALPHA-MANNOSIDASE) (MAN IIX) > |
| | | gi\|1132479\|dbj\|BAA09510\|(D55649) alpha mannosidase II isozyme [Homo |
| | | sapiens] Length = 1139 |
| 568 | 2026568 | 1E-106 > emb\|CAA19724.1\|(AL030978) receptor protein kinase |
| | | [Arabidopsis thaliana] Length = 815 |
| 569 | 2026569 | 1E-100 > gb\|AAF01311.1\|AF184093_1 (AF184093) spermine synthase |
| | | [Arabidopsis thaliana] > gi\|6013269\|gb\|AAF01312.1\|AF184094_1 (AF184094) |
| | | spermine synthase [Arabidopsis thaliana] Length = 339 |
| 570 | 2026570 | Tyr_Phospho_Site (75-83) |
| 571 | 2026571 | 4E-53 > dbj\|BAA82068.1\|(AB022329) nClpP4 [Arabidopsis thaliana] Length = |
| | | 299 |
| 572 | 2026572 | 2E-45 > gb\|AAD26876.1\|AC007230_10 (AC007230) Belongs to PF\|00026 |
| | | Eukaryotic aspartyl protease family. [Arabidopsis thaliana] Length = 449 |
| 573 | 2026573 | Tyr_Phospho_Site (963-969) |
| 574 | 2026574 | Pkc_Phospho_Site (71-73) |
| 575 | 2026575 | Tyr_Phospho_Site (49-57) |
| 576 | 2026576 | Tyr_Phospho_Site (172-179) |
| 577 | 2026577 | Tyr_Phospho_Site (180-186) |
| 578 | 2026578 | 2E-44 > gb\|AAD32820.1\|AC007659_2 (AC007659) symbiosis-related protein |
| | | [Arabidopsis thaliana] Length = 122 |
| 579 | 2026579 | 1E-46 > pir\|\|S58282 dTDP-glucose 4-6-dehydratases homolog - |
| | | Arabidopsis thaliana > gi\|928932\|emb\|CAA89205\|(Z49239) homolog of dTDP- |
| | | glucose 4-6-dehydratases [Arabidopsis thaliana] > gi\|1585435\|prf\|\|2124427B |
| | | diamide resis |
| 580 | 2026580 | 5E-87 > sp\|P29510\|TBA2_ARATH TUBULIN ALPHA-2/ALPHA-4 CHAIN > |
| | | gi\|320183\|pir\|\|JQ1594 tubulin alpha chain - Arabidopsis thaliana > gi\|166914 |
| | | (M84696) apha-2 tubulin [Arabidopsis thaliana] > gi\|166916 (M84697) alpha-4 |
| | | tubulin [Arabido |
| 581 | 2026581 | 3E-76 > gb\|AAD55604.1\|AC008016_14 (AC008016) Similar to gb\|AF108945 |
| | | signal peptidase 18 kDa subunit from Homo sapiens. ESTs gb\|H76629, |
| | | gb\|H76949 and gb\|H76216 come from this gene. [Arabidopsis thaliana] Length = |
| | | 180 |
| 582 | 2026582 | 1E-14 > prf\|\|1901324A ethionine resistancegene [Saccharomyces |
| | | cerevisiae] Length = 617 |
| 583 | 2026583 | Tyr_Phospho_Site (292-300) |
| 584 | 2026584 | Tyr_Phospho_Site (131-137) |
| 585 | 2026585 | 3E-78 ) > sp\|023066\|C862_ARATH CYTOCHROME P45086A2 > gi\|2252844 |
| | | (AF013293) belongs to the cytochrome p450 family [Arabidopsis thaliana] > |
| | | gi\|6049886\|gb\|AAF02801.1\|AF195115_21 (AF195115) belongs to the |
| | | cytochrome p450 family [Arab |
| 586 | 2026586 | 1E-56 ) > emb\|CAB10533.1\|(Z97343) GTP-binding RAB1C like protein |
| | | [Arabidopsis thaliana] Length = 221 |
| 587 | 2026587 | 1E-159 > emb\|CAA67796\|(X99419) ferrodoxin NADP oxidoreductase |
| | | [Pisum sativum] Length = 378 |
| 588 | 2026588 | Pkc_Phospho_Site (2-4) |
| 589 | 2026589 | 5E-28 > gi\|3341723 (AF052690) CONSTANS-like 1 protein [Raphanus |
| | | sativus] Length = 307 |
| 590 | 2026590 | 3E-58 > sp\|P43286\|WC2A_ARATH PLASMA MEMBRANE INTRINSIC |
| | | PROTEIN 2A > gi\|629542\|pir\|\|S44084 plasma membrane intrinsic protein 2a - |
| | | Arabidopsis thaliana > gi\|472877\|emblCAA53477\|(X75883) plasma membrane |
| | | intrinsic protein 2a [Arabidopsis thaliana] Length = 287 |
| 591 | 2026591 | 3′ Somatotropin 2 (575-592) |
| 592 | 2026592 | 5′ Pkc_Phospho_Site (22-24) |
| 593 | 2026593 | 5′ Tyr_Phospho_Site (258-265) |
| 594 | 2026594 | 5′ 2E-45 > gi\|131162\|sp\|P25252\|PSAC_SYINY3 PHOTOSYSTEM I IRON- |
| | | SULFUR CENTER 1 (PHOTOSYSTEM I SUBUNIT VII-1) (9 KD POLYPEPTIDE |
| | | 1) (PSI-C-1) > gi\|131163\|sp\|P07136\|PSAC TOBAC PHOTOSYSTEM I IRON- |
| | | SULFUR CENTER (PHOTOSYSTEM I SUBUNIT VII) (9 KD POLYPEPTIDE) |
| | | (PSI-C) > gi\|97657\|pir\|\|S14967 photosystem I i |
| 595 | 2026595 | 5′ 4E-74 > gi\|126894\|sp\|P19446\|MDHG_CITVU MALATE DEHYDROGENASE, |
| | | GLYOXYSOMAL PRECURSOR > gi\|319832\|pir\|\|DEPUGW malate dehydrogenase |
| | | (EC 1.1.1.37) precursor, glyoxysomal - watermelon > gi\|167284 (M33148) |
| | | glyoxysomal malate dehydrogenase precursor (EC 1.1.1.37) [Citrullus vulgaris] |
| | | Length = 356 |
| 596 | 2026596 | 9E-84 > gb\|AAD30232.1\|AC007202_14 (AC007202) Is a member of the PF\|00171 |
| | | aldehyde dehydrogenase family. ESTs gb\|T21534, gb\|N65241 and gb\|AA395614 |
| | | come from this gene. [Arabidopsis thaliana] Length = 509 |
| 597 | 2026597 | 1E-32 > dbj\|BAA81910.1\|(AB011262) nuclear transport factor 2 (NTF2) |
| | | [Oryza sativa] Length = 122 |
| 598 | 2026598 | 1E-108 > emb\|CAA23072\|(AL035396) SRG1-like protein [Arabidopsis |
| | | thaliana] Length = 353 |
| 599 | 2026599 | 9E-23 > emb\|CAA16566\|(AL021635) DNA binding protein [Arabidopsis |
| | | thaliana] Length = 324 |
| 600 | 2026600 | 9E-88 > dbj\|BAA32421\|(AB008106) ethylene responsive element binding |
| | | factor 4 [Arabidopsis thaliana] Length = 222 |
| 601 | 2026601 | 6E-23 > gi\|1946355 (U93215) maize transposon MuDR mudrA protein |
| | | isolog [Arabidopsis thaliana] > gi\|2880040 (AC002340) maize transposon MuDR |
| | | mudrA-like protein [Arabidopsis thaliana] Length = 754 |
| 602 | 2026602 | Tyr_Phospho_Site (256-264) |
| 603 | 2026603 | Tyr_Phospho_Site (177-185) |
| 604 | 2026604 | 5E-81 ) > gi\|3288821 (AF063901) alanine:glyoxylate aminotransferase; |
| | | transaminase [Arabidopsis thaliana] > gi\|4733989\|gb\|AAD28669.1\|AC007209_5 |
| | | (AC007209) alanine-glyoxylate aminotransferase [Arabidopsis thaliana] Length |
| 605 | 2026605 | Rgd (1044-1046) |
| 606 | 2026606 | Zinc_Finger_C3hc4 (837-846) |
| 607 | 2026607 | Tyr_Phospho_Site (246-253) |
| 608 | 2026608 | Tyr_Phospho_Site (168-176) |
| 609 | 2026609 | 1E-54 > emb\|CAA06853\|(AJ006095) 26S protease regulatory subunit 6 |
| | | [Cicer arietinum] Length = 177 |
| 610 | 2026610 | 2E-45 > sp\|Q42521\|DCE1_ARATH GLUTAMATE DECARBOXYLASE 1 (GAD |
| | | 1) > gi\|497979 (U10034) glutamate decarboxylase [Arabidopsis thaliana] Length = |
| | | 502 |
| 611 | 2026611 | Tyr_Phospho_Site (796-803) |
| 612 | 2026612 | 3′ 5E-24 > gi\|4325345\|gb\|AAD17344.1\|(AF128393) similar to thioredoxin-like |
| | | proteins (Pfam: PF00085, Score = 42.9, E = 1.4e-11, N = 1); contains similarity to |
| | | dihydroorotases (Pfam: PF00744, Score = 154.9, E = 1.4e-42, N = 1) [Arabidopsis |
| | | thaliana] Length = 488 |
| 613 | 2026613 | 3′ Tyr_Phospho_Site (290-296) |
| 614 | 2026614 | 5′ Pkc_Phospho_Site (44-46) |
| 615 | 2026615 | 5′ Pkc_Phospho_Site (23-25) |
| 616 | 2026616 | 5′ Tyr_Phospho_Site (442-448) |
| 617 | 2026617 | 5′ 6E-92 > gi\|1053093 (U38550) zeta-carotene desaturase precursor |
| | | [Arabidopsis thaliana] Length = 558 |
| 618 | 2026618 | Tyr_Phospho_Site (369-377) |
| 619 | 2026619 | 1E-101 ) > gb\|AAD31881.1\|(AF141661) AtHVA22c [Arabidopsis thaliana] > |
| | | gi\|4884946lgb\|AAD31886.1 \|AF141978_1 (AF141978) AtHVA22c [Arabidopsis |
| | | thaliana] Length = 184 |
| 620 | 2026620 | 3E-58 > prf\|\|1909359A ribosomal protein S19 [Solanum tuberosum] Length = |
| | | 133 |
| 621 | 2026621 | 2E-41 > gb\|AAB88706.1\|(AF036328) CLP protease regulatory subunit |
| | | CLPX [Arabidopsis thaliana] Length = 579 |
| 622 | 2026622 | 7E-41 > gi\|2224911 (U93048) somatic embryogenesis receptor-like |
| | | kinase [Daucus carota] Length = 553 |
| 623 | 2026623 | Tyr_Phospho_Site (95-101) |
| 624 | 2026624 | Tyr_Phospho_Site (90-96) |
| 625 | 2026625 | 5E-45 > gi\|2649345 (AE001019) tryptophan synthase, subunit beta (trpB- |
| | | 1) [Archaeoglobus fulgidus] Length = 435 |
| 626 | 2026626 | Tyr_Phospho_Site (759-767) |
| 627 | 2026627 | 1E-103 > gb\|AAD55284.1\|AC008263_15 (AC008263) Similar to gb\|AF000132 |
| | | betaine aldehyde dehydrogenase from Amaranthus hypochondriacus. ESTs |
| | | gb\|T20662, gb\|R90254, gb\|AA651436 and gb\|AA586226 come from this gene. |
| | | [Arabidopsis thaliana] Length = 501 |
| 628 | 2026628 | 1E-68 > gi\|2702268 (AC003033) cellulase [Arabidopsis thaliana] Length = |
| | | 525 |
| 629 | 2026629 | 4E-97 > emb\|CAB10312.1\|(Z97338) cytochrome P450 like protein |
| | | [Arabidopsis thaliana] Length = 517 |
| 630 | 2026630 | 1E-100 > gb\|AAD32292.1\|AC006533_16 (AC006533) protein kinase [Arabidopsis |
| | | thaliana] Length = 489 |
| 631 | 2026631 | 8E-58 ) > gi\|3044212 (AF057043) acyl-CoA oxidase [Arabidopsis |
| | | thaliana] Length = 692 |
| 632 | 2026632 | Tyr_Phospho_Site (573-579) |
| 633 | 2026633 | Tyr_Phospho_Site (483-490) |
| 634 | 2026634 | Tyr_Phospho_Site (474-480) |
| 635 | 2026635 | Tyr_Phospho_Site (573-580) |
| 636 | 2026636 | Rgd (1064-1066) |
| 637 | 2026637 | 9E-34 > gi\|3928095 (AC005770) protein kinase [Arabidopsis thaliana] |
| | | Length = 419 |
| 638 | 2026638 | 7E-45 > pir\|\|S26623 phosphoglycerate kinase (EC 2.7.2.3) - spinach |
| | | (fragment) Length = 425 |
| 639 | 2026639 | 7E-21 > gi\|498036 (L33791) lipid transfer protein [Senecio odorus] |
| | | Length = 89 |
| 640 | 2026640 | 6E-29 > emb\|CAB51180.1\|(AL096859) subtilisin-like proteinase homolog |
| | | [Arabidopsis thaliana] Length = 736 |
| 641 | 2026641 | 3E-30 > dbj\|BAA75684.1\|(AB017693) transfactor [Nicotians tabacum] |
| | | Length = 291 |
| 642 | 2026642 | 3′ 6E-52 > gi\|5915680\|sp\|P51568\|AFC3_ARATH PROTEIN KINASE AFC3 > |
| | | gi\|642134\|dbj\|BAA08216\|(D45355) protein kinase [Arabidopsis thaliana] > |
| | | gi\|3063704\|emb\|CAA18595.1\|(AL022537) protein kinase AME3 [Arabidopsis |
| | | thaliana] Length = 400 |
| 643 | 2026643 | 3′ 2E-35 > gil6225410\|sp\|Q9Z9W9\|GATA_BACHD GLUTAMYL-TRNA (GLN) |
| | | AMIDOTRANSFERASE SUBUNIT A (GLU-ADT SUBUNIT A) > |
| | | gi\|4512348\|dbj\|BAA75313.1\|(AB011836) similar to B. subtilis yerM gene (84%- |
| | | identity) [Bacillus halodurans] Length = 485 |
| 644 | 2026644 | 5′ Pkc_Phospho_Site (86-88) |
| 645 | 2026645 | 5′ Rgd (964-966) |
| 646 | 2026646 | 5′ Pkc_Phospho_Site (49-51) |
| 647 | 2026647 | 5′ 4E-67 > gi\|2493321\|sp\|Q40588\|ASO_TOBAC L-ASCORBATE OXIDASE |
| | | PRECURSOR (ASCORBASE) (ASO) > gi\|2129952\|pir\|\|S66353 L-ascorbate |
| | | oxidase (EC 1.10.3.3) precursor - common tobacco > gi\|599594\|dbj\|BAA07734\| |
| | | (D43624) ascorbate oxidase precursor [Nicotiana tabacum] Length = 578 |
| 648 | 2026648 | 5′ Pkc_Phospho_Site (53-55) |
| 649 | 2026649 | 5′ 2E-91 > gi\|1076422\|pir\|\|S48121 transcription factor OBF4 - Arabidopsis |
| | | thaliana > gi\|414613\|emb\|CAA49524\|(X69899) ocs-element binding factor 4 |
| | | [Arabidopsis thaliana] Length = 364 |
| 650 | 2026650 | Pkc_Phospho_Site (7-9) |
| 651 | 2026651 | Tyr_Phospho_Site (532-539) |
| 652 | 2026652 | 1E-75 ) > gi\|2654088 (AF033118) potassium transporter [Arabidopsis |
| | | thaliana] > gi\|2688979 (AF029876) high-affinity potassium transporter; AtKUP1p |
| | | [Arabidopsis thaliana] > gi\|3150413 (AC004165) high-affinity potassium tra |
| 653 | 2026653 | Tyr_Phospho_Site (813-820) |
| 654 | 2026654 | Tyr_Phospho_Site (858-864) |
| 655 | 2026655 | 2E-55 ) > gi\|2829893 (AC002311) phosphoglucomutase [Arabidopsis |
| | | thaliana] Length = 582 |
| 656 | 2026656 | 6E-48 > gb\|AAD29056.1\|AC007018_4 (AC007018) cytochrome P450 |
| | | [Arabidopsis thaliana] Length = 442 |
| 657 | 2026657 | 2E-69 > gb\|AAD29757.1\|AF076243_4 (AF076243) WRKY DNA-binding protein |
| | | [Arabidopsis thaliana] Length = 528 |
| 658 | 2026658 | 3E-34 > emb\|CAA12276\|(AJ224986) cinnamoyl CoA reductase [Populus |
| | | balsamifera subsp. trichocarpa] Length = 338 |
| 659 | 2026659 | 7E-86 ) > sp\|Q39172\|P1_ARATH PROBABLE NADP-DEPENDENT |
| | | OXIDOREDUCTASE P1 > gi\|1362013\|pir\|\|S57611 zeta-crystallin homolog - |
| | | Arabidopsis thaliana > gi\|886428\|emb\|CAA89838\|(Z49768) zeta-crystallin |
| | | homologue [Arabidopsis thaliana] Length = 345 |
| 660 | 2026660 | 1E-79 > gi\|3763919 (AC004450) isopropylmalate dehydratase |
| | | [Arabidopsis thaliana] > gi\|4531436\|gb\|AAD22121.1\|AC006224_3 (AC006224) |
| | | isopropylmalate dehydratase [Arabidopsis thaliana] Length = 256 |
| 661 | 2026661 | 1E-47 > gb\|AAD55300.1\|AC008263_31 (AC008263) Similar to gb\|AF049930 |
| | | PGP237-11 from Petunia × hybrida and contains a PF\|00097 Zinc (RING) finger |
| | | domain. [Arabidopsis thaliana] Length = 255 |
| 662 | 2026662 | 6E-31 > sp\|P51281\|YC45_PORPU HYPOTHETICAL 64.2 KD PROTEIN YCF45 |
| | | (ORF565) > gi\|2147571\|pir\|\|S73202 hypothetical protein 565 - Porphyra purpurea |
| | | chloroplast > gi\|1276747 (U38804) trnS [Porphyra purpurea] Length = 565 |
| 663 | 2026663 | 6E-82 > sp\|P39207\|NDK1_ARATH NUCLEOSIDE DIPHOSPHATE KINASE I |
| | | (NDK I) (NDP KINASE I) > gi\|3169310 (AF017641) nucleoside diphosphate kinase |
| | | type 1 [Arabidopsis thaliana] > gi\|5881777\|emb\|CAB55695.1\|(AL117386) |
| | | nucleoside-diphosphate kinase [Arabidopsis thaliana] Length = 149 |
| 664 | 2026664 | 7E-21 > emb\|CAB43843.1\|(AL078464) transcription factor-like protein |
| | | [Arabidopsis thaliana] Length = 653 |
| 665 | 2026665 | 7E-30 > pir\|\|S46444 myosin MYA1, class V - Arabidopsis thaliana > |
| | | gi\|433663\|emb\|CAA82234\|(Z28389) myosin [Arabidopsis thaliana] Length = |
| | | 1520 |
| 666 | 2026666 | 5′ Pkc_Phospho_Site (22-24) |
| 667 | 2026667 | 5′ Tyr_Phospho_Site (785-792) |
| 668 | 2026668 | 5′ 2E-72 > gi\|4914440\|emb\|CAB43643.1\|(AL050351) phenylalanyl-trna |
| | | synthetase-like protein [Arabidopsis thaliana] Length = 428 |
| 669 | 2026669 | 5′ 4E-46 > gi\|2108252\|emb\|CAA71277\|(Y10228) P-glycoprotein-2 [Arabidopsis |
| | | thaliana] > gi\|2108254\|emb\|CAA71276\|(Y10227) P-glycoprotein-2 [Arabidopsis |
| | | thaliana] > gi\|4538925\|emb\|CAB39661.1\|(AL049483) P-glycoprotein-2 (pgp2) |
| | | [Arabidopsis thaliana] Length = 1233 |
| 670 | 2026670 | 4E-81 > gi\|2342674 (AC000106) Similar to ATP-dependent Clp protease |
| | | (gb\|D90915). EST gb\|N65461 comes from this gene. [Arabidopsis thaliana] Length = |
| | | 292 |
| 671 | 2026671 | Tyr_Phospho_Site (895-903) |
| 672 | 2026672 | 4E-35 > emb\|CAB51191.1\|(AL096859) chloroplast import-associated |
| | | channel homolog [Arabidopsis thaliana] Length = 818 |
| 673 | 2026673 | Receptor_Cytokines_1 (427-439) |
| 674 | 2026674 | 7E-63 >bbs\|160507 (S75487) alcohol dehydrogenase ADH = alcohol |
| | | dehydrogenase homolog {EC 1.1.1.1} [Lycopersicon esculentum = tomatoes, cv. |
| | | red cherry, Peptide, 389 aa] [Lycopersicon esculentum] Length = 389 |
| 675 | 2026675 | 7E-29 > gb\|AAD48836.1\|AF165924_1 (AF165924) auxin-induced basic helix-loop- |
| | | helix transcription factor [Gossypium hirsutum] Length = 314 |
| 676 | 2026676 | Tyr_Phospho_Site (967-974) |
| 677 | 2026677 | 1E-10 > gi\|3928095 (AC005770) protein kinase [Arabidopsis thaliana] |
| | | Length = 419 |
| 678 | 2026678 | 1E-116 > gi\|3249100 (AC003114) Match to calreticulin (AtCRTL) mRNA |
| | | gb\|U27698 and DMA gb\|U66344. ESTs gb\|T45719, gb\|T22451, gb\|H36323 and |
| | | gb\|AA042519 come from this gene. [Arabidopsis thaliana] Length = 444 |
| 679 | 2026679 | Tyr_Phospho_Site (331-337) |
| 680 | 2026680 | Tyr_Phospho_Site (796-804) |
| 681 | 2026681 | 4E-55 > emb\|CAA31787\|(X13435) nitrate reductase NR2 (396 AA) |
| | | [Arabidopsis thaliana] Length = 396 |
| 682 | 2026682 | 4E-39 > gb\|AAD30576.1\|AC007260_7 (AC007260) Highly similar to rice zinc |
| | | finger protein [Arabidopsis thaliana] Length = 327 |
| 683 | 2026683 | 1E-49 > emb\|CAA10128\|(AJ012687) beta-galactosidase [Cicer arietinum] |
| | | Length = 745 |
| 684 | 2026684 | 1E-15 > gi\|2622711 (AE000918) ferripyochelin binding protein |
| | | [Methanobacterium thermoautotrophicum] Length = 151 |
| 685 | 2026685 | Pkc_Phospho_Site (9-11) |
| 686 | 2026686 | 3E-44 > gi\|1871181 (U90439) ring zinc finger protein isolog [Arabidopsis |
| | | thaliana] Length = 425 |
| 687 | 2026687 | Pkc_Phospho_Site (148-150) |
| 688 | 2026688 | 9E-38 > emb\|CAA76418\|(Y16848) cinnamyl alcohol dehydrogenase-like |
| | | protein, subunit a [Arabidopsis thaliana] > gi\|4467103\|emb\|CAB37537\|(AL035538) |
| | | cinnamyl alcohol dehydrogenase-like protein, LCADa [Arabidopsis thaliana] |
| | | Length = 363 |
| 689 | 2026689 | Tyr_Phospho_Site (282-289) |
| 690 | 2026690 | 3′ 2E-58 > gi\|4972114\|emb\|CAB43971.1\|(AL078579) beta-glucosidase |
| | | [Arabidopsis thaliana] Length = 517 |
| 691 | 2026691 | 3′ 2E-83 > gi\|4579913\|dbj\|BAA75015.1\|(AB023423) sulfate transporter |
| | | [Arabidopsis thaliana] Length = 631 |
| 692 | 2026692 | 3′ 2E-37 > gi\|3335377 (AC003028) cytoskeletal protein [Arabidopsis |
| | | thaliana] > gi\|3395442 (AC004683) cytoskeletal protein [Arabidopsis thaliana] |
| | | Length = 299 |
| 693 | 2026693 | 3′ Pkc_Phospho_Site (4-6) |
| 694 | 2026694 | 5′ Pkc_Phospho_Site (22-24) |
| 695 | 2026695 | 5′ Tyr_Phospho_Site (356-364) |
| 696 | 2026696 | 5′ 7E-34 > gi\|4758634\|ref\|NP_004913.1\|pKIAA0079\|Sec24p, S. Cerevisiae, |
| | | homolog of > gi\|1723050\|sp\|P53992\|Y079_HUMAN HYPOTHETICAL PROTEIN |
| | | KIAA0079 (HA3543) > gi\|559717\|dbj\|BAA07558\|(D38555) The ha3543 gene |
| | | product is related to S. cerevisiae protein encoded in chromosome VIII. [Homo |
| | | sapiens] Leng |
| 697 | 2026697 | 5′ Pkc_Phospho_Site (62-64) |
| 698 | 2026698 | 3E-65 > gb\|AAD25772.1\|AC006577_8 (AC006577) Belongs to the PF\|00657 |
| | | Lipase/Acylhydrolase with GDSL-motif family. ESTs gb\|T44453, gb\|T04815, |
| | | gb\|T45993, gb\|R30138, gb\|AI099570 and gb\|T22281 come from this gene. |
| | | [Arabidopsis thaliana] Length = 397 |
| 699 | 2026699 | Tyr_Phospho_Site (84-92) |
| 700 | 2026700 | 1E-157 > gi\|1477480 (U40341) carbamoyl phosphate synthetase large |
| | | chain [Arabidopsis thaliana] Length = 1187 |
| 701 | 2026701 | Tyr_Phospho_Site (265-272) |
| 702 | 2026702 | 7E-94 > dbj\|BAA84364.1\|(D84225) DEIH-box RNA/DNA helicase |
| | | [Arabidopsis thaliana] Length = 1538 |
| 703 | 2026703 | Tyr_Phospho_Site (1184-1191) |
| 704 | 2026704 | Tyr_Phospho_Site (1116-1124) |
| 705 | 2026705 | 8E-14 > gi\|2618725 (U49074) IAA18 [Arabidopsis thaliana] Length = 236 |
| 706 | 2026706 | 6E-68 > gi\|3176676 (AC003671) Similar to carbonic anhydrase |
| | | gb\|L19255 from Nicotiana tabacum. ESTs gb\|AA597643, gb\|T45390, gb\|T43963 |
| | | and gb\|AA597734 come from this gene. [Arabidopsis thaliana] Length = 258 |
| 707 | 2026707 | 1E-49 > gi\|3135611 (AF062485) cellulose synthase [Arabidopsis thaliana] |
| | | Length = 1081 |
| 708 | 2026708 | 3E-13 > gb\|AAD55291.1\|AC008263_22 (AC008263) Contains 3 PF\|01535 DUF17 |
| | | domains. [Arabidopsis thaliana] Length = 862 |
| 709 | 2026709 | 6E-60 > sp\|P16972\|FER_ARATH FERREDOXIN PRECURSOR > |
| | | gi\|99692\|pir\|\|S09979 ferredoxin [2Fe-2S] precursor - Arabidopsis thaliana > |
| | | gi\|16437\|emb\|CAA35754\|(X51370) ferredoxin precursor [Arabidopsis thaliana] > |
| | | gi\|166698 (M35868) ferro |
| 710 | 2026710 | 4E-27 > gb\|AAD50383.1\|AF147725_1 (AF147725) ribosomal protein L29 [Zea |
| | | mays] Length = 161 |
| 711 | 2026711 | 1E-115 > emb\|CAB10223.1\|(Z97336) carnitine racemase like protein |
| | | [Arabidopsis thaliana] Length = 238 |
| 712 | 2026712 | Tyr_Phospho_Site (580-586) |
| 713 | 2026713 | 1E-111 > gb\|AAC34225.1\|(AC004411) p-glycoprotein [Arabidopsis |
| | | thaliana] Length = 1286 |
| 714 | 2026714 | 3′ Tyr_Phospho_Site (492-498) |
| 715 | 2026715 | 5′ Tyr_Phospho_Site (226-233) |
| 716 | 2026716 | 2E-22 > pir\|\|A48892 abscisic acid-induced protein HVA22 - barley > |
| | | gi\|404589 (L19119) A22 [Hordeum vulgare] Length = 130 |
| 717 | 2026717 | Tyr_Phospho_Site (77-83) |
| 718 | 2026718 | 2E-37 > emb\|CAB41088.1\|(AL049655) protein disulfide-isomerase-like |
| | | protein [Arabidopsis thaliana] Length = 566 |
| 719 | 2026719 | 2E-45 > gi\|2642159 (AC003000) mannose-1 -phosphate |
| | | guanyltransferase [Arabidopsis thaliana] > gi\|3598958 (AF076484) GDP-mannose |
| | | pyrophosphorylase [Arabidopsis thaliana] > gi\|4151925 (AF108660) CYT1 protein |
| | | [Arabidopsis thaliana] Length = 361 |
| 720 | 2026720 | Pkc_Phospho_Site (2-4) |
| 721 | 2026721 | 2E-36 > sp\|O04130\|SERA_ARATH D-3-PHOSPHOGLYCERATE |
| | | DEHYDROGENASE PRECURSOR (PGDH) > gi\|2189964\|dbj\|BAA20405\| |
| | | (AB003280) Phosphoglycerate dehydrogenase [Arabidopsis thaliana] > |
| | | gi\|2804258\|dbj\|BAA24440\|(AB010407) phosphoglycerate dehydrogenase |
| | | [Arabidopsis thaliana] Length = 624 |
| 722 | 2026722 | Pkc_Phospho Site (60-62) |
| 723 | 2026723 | Vwfc (839-879) |
| 724 | 2026724 | 2E-17 > emb\|CAB51196.1\|(AL096859) glucuronosyl transferase-like protein |
| | | [Arabidopsis thaliana] Length = 452 |
| 725 | 2026725 | Tyr_Phospho_Site (11-18) |
| 726 | 2026726 | Pts_Hpr_Ser (823-838) |
| 727 | 2026727 | Pkc_Phospho_Site (36-38) |
| 728 | 2026728 | Tyr_Phospho_Site (1013-1020) |
| 729 | 2026729 | Tyr_Phospho_Site (147-155) |
| 730 | 2026730 | 1E-66 ) > sp\|P32068\|TRPE_ARATH ANTHRANILATE SYNTHASE |
| | | COMPONENT I-1 PRECURSOR > gi\|166604 (M92353) anthranilate synthase |
| | | alpha subunit [Arabidopsis thaliana] Length = 595 |
| 731 | 2026731 | 5E-22 > gi\|3004563 (AC003673) similar to APG (non proline-rich region) |
| | | [Arabidopsis thaliana] > gi\|3176703 (AC002392) proline-rich protein APG |
| | | [Arabidopsis thaliana] Length = 344 |
| 732 | 2026732 | 3E-75 > gi\|3288821 (AF063901) alanine:glyoxylate aminotransferase; |
| | | transaminase [Arabidopsis thaliana] > gi\|4733989\|gb\|AAD28669.1\|AC007209_5 |
| | | (AC007209) alanine-glyoxylate aminotransferase [Arabidopsis thaliana] Length |
| 733 | 2026733 | 1E-109 ) > gi\|4115388 (AC005967) prolylcarboxypeptidase [Arabidopsis |
| | | thaliana] Length = 476 |
| 734 | 2026734 | 2E-77 > emb\|CAB38793.1\|(AL035678) Tic22-like protein [Arabidopsis |
| | | thaliana] Length = 268 |
| 735 | 2026735 | Tyr_Phospho_Site (4-12) |
| 736 | 2026736 | 2E-85 > gi\|3176687 (AC003671) Strong similarity to trehalose-6- |
| | | phosphate synthase homolog from A. thaliana chromosome 4 contig gb\|Z97344. |
| | | ESTs gb\|H37594, gb\|R65023, gb\|H37578 and gb\|R64855 come from this gene. |
| | | [Arabidopsis thaliana] Length = 826 |
| 737 | 2026737 | 5′ Pkc_Phospho_Site (25-27) |
| 738 | 2026738 | 5′ 3E-95 > gi\|3128187 (AC004521) beta-glucosidase [Arabidopsis |
| | | thaliana] Length = 506 |
| 739 | 2026739 | 5′ Tyr_Phospho_Site (894-902) |
| 740 | 2026740 | 5′ 1E-62 > gi\|218310\|dbj\|BAA01974\|(D11375) chloroplast elongation factor |
| | | TuA (EF-TuA) [Nicotiana sylvestris] Length = 457 |
| 741 | 2026741 | 5′ Tyr_Phospho_Site (939-946) |
| 742 | 2026742 | 5′ Tyr_Phospho_Site (327-333) |
| 743 | 2026743 | 5′ Tyr_Phospho_Site (154-162) |
| 744 | 2026744 | 5′ 5E-68 > gi\|3687654 (AF047975) ethylene receptor; ETR2 |
| | | [Arabidopsis thaliana] Length = 773 |
| 745 | 2026745 | 5′ 2E-62 > gi\|4309738\|gb\|AAD15508\|(AC006439) tubby protein [Arabidopsis |
| | | thaliana] Length = 386 |
| 746 | 2026746 | 5′ 3E-58 > gi\|3779021 (AC005171) reverse transcriptase [Arabidopsis |
| | | thaliana] Length = 1402 |
| 747 | 2026747 | 5′ Pkc_Phospho_Site (5-7) |
| 748 | 2026748 | 1E-55 > emb\|CAB45799.1\|(AL080252) nodulin-like protein [Arabidopsis |
| | | thaliana] Length = 384 |
| 749 | 2026749 | 1E-92 > gi\|3249084 (AC004473) Similar to red-1 (related to thioredoxin) |
| | | genegb\|X92750 from Mus musculus. ESTs gb\|AA712687 and gb\|Z37223 come |
| | | from this gene [Arabidopsis thaliana] Length = 578 |
| 750 | 2026750 | Pkc_Phospho_Site (30-32) |
| 751 | 2026751 | 6E-22 > gi\|2494130 (AC002376) Contains similarity to Glycine SRC2 |
| | | (gb\|AB000130). [Arabidopsis thaliana] Length = 578 |
| 752 | 2026752 | Pkc_Phospho_Site (19-21) |
| 753 | 2026753 | Pkc_Phospho_Site (22-24) |
| 754 | 2026754 | 1E-11 > sp\|Q38814\|THI4_ARATH THIAZOLE BIOSYNTHETIC ENZYME |
| | | PRECURSOR (ARA6) > gi\|2129750\|pir\|\|S71191 TH14 protein homolog - |
| | | Arabidopsis thaliana > gi\|1113783 (U17589) Thi1 protein [Arabidopsis thaliana] |
| | | Length = 349 |
| 755 | 2026755 | 1E-58 ) > gi\|3894200 (AC005662) ferredoxin-dependent glutamate |
| | | synthase [Arabidopsis thaliana] Length = 1629 |
| 756 | 2026756 | 3E-21 > gi\|4115913 (AF118222) contains similarity to Iron/Ascorbate |
| | | family of oxidoreductases (Pfam: PF00671, Score = 307.1, E = 2.2e-88, N = 1) |
| | | [Arabidopsis thaliana] > gi\|4539409\|emb\|CAB40042.1\|(AL049524) flavano |
| 757 | 2026757 | 1E-93 > gb\|AAF00654.1\|AC008153_6 (AC008153) eukaryotic translation initiation |
| | | factor 3 subunit [Arabidopsis thaliana] Length = 294 |
| 758 | 2026758 | 9E-92 > gi\|2795805 (AC003674) protein kinase [Arabidopsis thaliana] > |
| | | gi\|3355493 (AC004218) protein kinase [Arabidopsis thaliana] Length = 395 |
| 759 | 2026759 | Tyr_Phospho_Site (757-763) |
| 760 | 2026760 | Pkc_Phospho_Site (74-76) |
| 761 | 2026761 | 1E-101 > gb\|AAD26634.1\|(AF110407) ATP sulfurylase precursor |
| | | [Arabidopsis thaliana] > gi\|4803653\|emb\|CAB42640.1\|(AJ012586) sulfate |
| | | adenylyltransferase [Arabidopsis thaliana] Length = 469 |
| 762 | 2026762 | 2E-21 > sp\|P92965\|RS40_ARATH ARGININE/SERINE-RICH SPLICING |
| | | FACTOR RSP40 > gi\|2582641\|emb\|CAA67800\|(X99437) splicing factor |
| | | [Arabidopsis thaliana] > gi\|2980800\|emb\|CAA18176.1\|(AL022197) splicing factor |
| | | At-SRp40 [Arabidopsis thal |
| 763 | 2026763 | 2E-90 > emb\|CAA16683\|(AL021684) lysosomal Pro-X carboxypeptidase - |
| | | like protein [Arabidopsis thaliana] Length = 499 |
| 764 | 2026764 | 4E-28 > sp\|O25225\|TYPA_HELPY GTP-BINDING PROTEIN TYPA/BIPA |
| | | HOMOLOG > gi\|2313589\|gb\|AAD07546.1\|(AE000562) GTP-binding protein, fusA- |
| | | homolog (yihK) [Helicobacter pylori 26695] Length = 599 |
| 765 | 2026765 | 5E-40 > gb\|AAD34236.1\|AF083913_1 (AF083913) annexin [Arabidopsis thaliana] |
| | | Length = 317 |
| 766 | 2026766 | 1E-83 > sp\|Q43147\|CP85_LYCES CYTOCHROME P450 85 (DWARF |
| | | PROTEIN) > gi\|1421741 (U54770) cytochrome P450 homolog [Lycopersicon |
| | | esculentum] Length = 464 |
| 767 | 2026767 | 3′ 1E-13 > gi\|2827558\|emb\|CAA16566\|(AL021635) DNA binding protein |
| | | [Arabidopsis thaliana] Length = 324 |
| 768 | 2026768 | 3′ 8E-18> gi\|2827656\|emb\|CAA16610.1\|(AL021637) DAG-like protein |
| | | [Arabidopsis thaliana] Length = 419 |
| 769 | 2026769 | 3′ 4E-23 > gi\|3643609 (AC005395) CysSHis zinc finger protein |
| | | [Arabidopsis thaliana] Length = 315 |
| 770 | 2026770 | 5′ Tyr_Phospho_Site (695-703) |
| 771 | 2026771 | 5′ Pkc_Phospho_Site (141-143) |
| 772 | 2026772 | 5′ Tyr_Phospho_Site (9-16) |
| 773 | 2026773 | 5′ 5E-26> gi\|1730107\|sp\|P51091\|LDOX_MALSP LEUCOANTHOCYANIDIN |
| | | DIOXYGENASE (LDOX) (LEUCOANTHOCYANIDIN HYDROXYLASE) > |
| | | gi\|421870\|pir\|\|S33144 anthocyanidin hydroxylase - apple tree > |
| | | gi\|296844\|emb\|CAA50498\|(X71360) anthocyanidin hydroxylase [Malus sp.] > |
| | | gi\|4588783\|gb\|AAD26205.1\|AF117269_1 (AF117269) |
| 774 | 2026774 | 5′ 1E-67 > gi\|99696\|pir\|\|S18600 glutamate- ammonia ligase (EC 6.3.1.2) |
| | | precursor, chloroplast (clone lambdaAtgsl1) - Arabidopsis thaliana > |
| | | gi\|240070\|bbs)69728 (S69727) light-regulated glutamine synthetase isoenzyme |
| | | [Arabidopsis thaliana, Peptide, 430 aa] [Arabidopsis thaliana] > gi\|228453\|pr |
| 775 | 2026775 | 5′ 2E-27 > gi\|4514637\|dbj\|BAA75477.1\|(AB021176) root cap protein 2 [Zea |
| | | mays] Length = 349 |
| 776 | 2026776 | 5′ Tyr_Phospho_Site (202-209) |
| 111 | 2026777 | Tyr_Phospho_Site (336-342) |
| 778 | 2026778 | 1E-36 > gb\|AAD15508\|(AC006439) tubby protein [Arabidopsis thaliana] |
| | | Length = 386 |
| 779 | 2026779 | Tyr_Phospho_Site (23-29) |
| 780 | 2026780 | Tyr_Phospho_Site (1077-1084) |
| 781 | 2026781 | 1E-100 > gi\|3702314 (AC002535) similar to SWI/SNF complex subunit |
| | | BAF170 [Arabidopsis thaliana] Length = 435 |
| 782 | 2026782 | 5E-39 > emb\|CAA07251\|(AJ006787) phytochelatin synthetase |
| | | [Arabidopsis thaliana] Length = 362 |
| 783 | 2026783 | Pkc_Phospho_Site (45-47) |
| 784 | 2026784 | Tyr_Phospho_Site (732-739) |
| 785 | 2026785 | Tyr_Phospho_Site (151-158) |
| 786 | 2026786 | 1E-107 ) > gi\|2462761 (AC002292) Highly similar to auxin-induced protein |
| | | (aldo/keto reductase family) [Arabidopsis thaliana] Length = 340 |
| 787 | 2026787 | 6E-59 ) > emb\|CAA23008\|(AL035356) clathrin coat assembly like protein |
| | | [Arabidopsis thaliana] Length = 451 |
| 788 | 2026788 | Tyr_Phospho_Site (809-816) |
| 789 | 2026789 | 5E-49 > sp\|Q42577\|NUKM_ARATH NADH-UBIQUINONE OXIDOREDUCTASE |
| | | 20 KD SUBUNIT PRECURSOR (COMPLEX I-20KD) (CI-20KD) > |
| | | gi\|1084345\|pir\|\|S52286 NADH dehydrogenase (EC 1.6.99.3) - Arabidopsis |
| | | thaliana > gi\|643090\|emb\|CAA58887.1\|(X84078) NADH dehydrogenase |
| | | [Arabidopsis thaliana] Length = 218 |
| 790 | 2026790 | 1E-40 > pir\|\|S59544 stress-induced protein OZI1 precursor - Arabidopsis |
| | | thaliana > gi\|790583 (U20347) mRNA corresponding to this gene accumulates in |
| | | response to ozone stress and pathogen (bacterial) infection; pathogenesis-related |
| | | protein [Arabidopsis thaliana] > gi\|2252869 (AF013294) No definition line found |
| | | [Arabidopsis thaliana] Length = 80 |
| 791 | 2026791 | Tyr_Phospho_Site (467-475) |
| 792 | 2026792 | 3′ Pkc_Phospho_Site (18-20) |
| 793 | 2026793 | 5′ Tyr_Phospho_Site (819-826) |
| 794 | 2026794 | 5′ Tyr_Phospho_Site (370-377) |
| 795 | 2026795 | 5′ 1E-27> gi\|3646451\|emb\|CAA20915.1\|(AL031603) mRNA cap |
| | | methyltransferase [Schizosaccharomyces pombe] Length = 389 |
| 796 | 2026796 | 7E-12 > gb\|AAD22687.1\|AC007063_13 (AC007063) vanadate resistance protein |
| | | [Arabidopsis thaliana] Length = 284 |
| 797 | 2026797 | Tyr_Phospho_Site (314-320) |
| 798 | 2026798 | 3E-42 > gi\|4185143 (AC005724) signal recognition particle receptor beta |
| | | subunit [Arabidopsis thaliana] Length = 260 |
| 799 | 2026799 | 4E-59 > ref\|NP_006420.1\|PNIP7-1\|chaperonin containing TCP1, subunit 7 (eta); |
| | | CCT-eta > gi\|3041738\|sp\|Q99832\|TCPH_HUMAN T-COMPLEX PROTEIN 1, ETA |
| | | SUBUNIT (TCP-1-ETA) (CCT-ETA) (HIV-1 NEF INTERACTING PROTEIN) > |
| | | gi\|2559010 (AF026292) chaperonin containing t-complex polypeptide 1, eta subu |
| 800 | 2026800 | 1E-119 ) > emb\|CAB38830.1\|(AL035679) ES43 like protein [Arabidopsis |
| | | thaliana] Length = 258 |
| 801 | 2026801 | Pkc_Phospho_Site (9-11) |
| 802 | 2026802 | Tyr_Phospho_Site (478-485) |
| 803 | 2026803 | Tyr_Phospho_Site (704-711) |
| 804 | 2026804 | Tyr_Phospho_Site (42-50) |
| 805 | 2026805 | 4E-83 > gb\|AAD24412.1\|AF036309_1 (AF036309) scarecrow-like 14 [Arabidopsis |
| | | thaliana] Length = 808 |
| 806 | 2026806 | 2E-20 > gi\|3337352 (AC004481) chromatin structural protein Supt5hp |
| | | [Arabidopsis thaliana] Length = 990 |
| 807 | 2026807 | 1E-114 > gi\|3288821 (AF063901) alanine:glyoxylate aminotransferase; |
| | | transaminase [Arabidopsis thaliana] > gi\|4733989\|gb\|AAD28669.1\|AC007209_5 |
| | | (AC007209) alanine-glyoxylate aminotransferase [Arabidopsis thaliana] Length |
| 808 | 2026808 | Pkc_Phospho_Site (49-51) |
| 809 | 2026809 | Pkc_Phospho_Site (92-94) |
| 810 | 2026810 | 5E-22 > gb\|AAD20070\|(AC006836) hypothetical protein [Arabidopsis |
| | | thaliana] Length = 421 |
| 811 | 2026811 | Rgd (964-966) |
| 812 | 2026812 | 4E-52 > gi\|2160158 (AC000132) Similar to elongation factor 1-gamma |
| | | (gb\|EF1G_XENLA). ESTs gb\|T20564,gb\|T45940,gb\|T04527 come from this gene. |
| | | [Arabidopsis thaliana] Length = 414 |
| 813 | 2026813 | 2E-81 > gi\|2062157 (AC001645) jasmonate inducible protein isolog |
| | | [Arabidopsis thaliana] Length = 705 |
| 814 | 2026814 | 7E-98 > emb\|CAA10056\|(AJ012552) polyubiquitin [Vicia faba] > |
| | | gi\|5732081\|gb\|AAD48980.1\|AF162444_12 (AF162444) contains similarity to |
| | | Pfam family PF00240 - Ubiquitin family; score = 526.5, E = 1.9e-154, N = 3 |
| | | [Arabidopsis thaliana] Length = 229 |
| 815 | 2026815 | 9E-53 > gi\|2995990 (AF053746) dormancy-associated protein |
| | | [Arabidopsis thaliana] > gi\|2995992 (AF053747) dormancy-associated protein |
| | | [Arabidopsis thaliana] Length = 122 |
| 816 | 2026816 | 4E-90 > sp\|P37702\|MYRO_ARATH MYROSINASE PRECURSOR |
| | | (SINIGRINASE) (THIOGLUCOSIDASE) > gi\|1362006\|pir\|\|S56653 thioglucosidase |
| | | (EC 3.2.3.1) - Arabidopsis thaliana > gi\|304115 (L11454) thioglucosidase |
| | | [Arabidopsis thaliana] > gi\|871990\|emb\|CAA55786\|(X79194) thioglucosidase |
| | | [Arabidopsis thaliana] > gi\|5107830\|gb\|AAD40143.1\|AF149413_24 (AF149413) |
| | | Arabidopsis thaliana thioglucosidase (SW:P37702); Pfam PF00232, Score = 666.9, |
| | | E = 1e-196, N = 1 Length = 541 |
| 817 | 2026817 | 2E-11 > sp\|Q92413\|OAT_EMENI ORNITHINE AMINOTRANSFERASE |
| | | (ORNITHINE-OXO-ACID AMINOTRANSFERASE) > gi\|4416517\|gb\|AAB18259\| |
| | | (U74303) ornithine transaminase [Emericella nidulans] Length = 453 |
| 818 | 2026818 | 3′ 4E-17 > gi\|5706505\|emb\|CAB52267.1\|(AL109739) trp-asp repeat protein |
| | | [Schizosaccharomyces pombe] Length = 507 |
| 819 | 2026819 | 5′ Tyr_Phospho_Site (796-804) |
| 820 | 2026820 | 5′ 6E-69 > gi\|5881784\|emb\|CAB55758.1\|(AJ249442) AUX1-like permease |
| | | [Arabidopsis thaliana] Length = 485 |
| 821 | 2026821 | 5′ Rgd (256-258) |
| 822 | 2026822 | 5′ 1E-88 > gi\|3123329\|emb\|CAA06771.1\|(AJ005929) squalene epoxidase |
| | | homologue [Arabidopsis thaliana] Length = 516 |
| 823 | 2026823 | Tyr_Phospho_Site (321-328) |
| 824 | 2026824 | 2E-46 > gi\|1531672 (U68461) actin [Striga asiatica] Length = 377 |
| 825 | 2026825 | Tyr_Phospho_Site (683-690) |
| 826 | 2026826 | 3E-25 > gb\|AAD55598.1\|AC008016_8 (AC008016) Is a member of the PF\|00364 |
| | | Biotin-requiring enzymes family. ESTs gb\|F19971 and gb\|F19970 come from this |
| | | gene. [Arabidopsis thaliana] Length = 234 |
| 827 | 2026827 | 1E-110 > gi\|3176708 (AC002392) proline-rich protein APG [Arabidopsis |
| | | thaliana] Length = 349 |
| 828 | 2026828 | 1E-102 > gb\|AAD18114\|(AC006403) NAM protein [Arabidopsis thaliana] |
| | | Length = 316 |
| 829 | 2026829 | Tyr_Phospho_Site (86-94) |
| 830 | 2026830 | Pkc_Phospho_Site (67-69) |
| 831 | 2026831 | 4E-35 > dbj\|BAA22813\|(D26015) CND41, chloroplast nucleoid DNA |
| | | binding protein [Nicotiana tabacum] Length = 502 |
| 832 | 2026832 | Tyr_Phospho_Site (599-606) |
| 833 | 2026833 | 8E-55 > emb\|CAA64329\|(X94626) AATP2 [Arabidopsis thaliana] Length = |
| | | 569 |
| 834 | 2026834 | Tyr_Phospho_Site (56-62) |
| 835 | 2026835 | 8E-57 > gb\|AAD39834.1\|AF073329_1 (AF073329) eukaryotic translation initiation |
| | | factor 3 large subunit [Zea mays] Length = 962 |
| 836 | 2026836 | Pkc_Phospho_Site (12-14) |
| 837 | 2026837 | 3E-58 > emb\|CAA55397\|(X78820) casein kinase I [Arabidopsis thaliana] |
| | | Length = 364 |
| 838 | 2026838 | 4E-13 > gb\|AAD55610.1\|AC008016_20 (AC008016) Contains PF\|00069 |
| | | Eukaryotic protein kinase domain. ESTs gb\|W43822, gb\|T20475 and |
| | | gb\|AA586152 come from this gene. [Arabidopsis thaliana] Length = 347 |
| 839 | 2026839 | Tyr_Phospho_Site (228-236) |
| 840 | 2026840 | 2E-99 > sp\|P26587\|TIPA_ARATH TONOPLAST INTRINSIC PROTEIN, ALPHA |
| | | (ALPHA TIP) > gi\|99760\|pir\|\|S22201 tonoplast intrinsic protein alpha - Arabidopsis |
| | | thaliana > gi\|16182\|emb\|CAA45114\|(X63551) tonoplast intrinsic protein: alpha- |
| | | TIP (Ara) [Arabidopsis thaliana] > gi\|166623 (M84343) tonoplast intrinsic protein |
| | | [Arabidopsis thaliana] > gi\|445128\|prf\|\|1908432A tonoplast intrinsic protein alpha |
| | | [Arabidopsis thaliana] Length = 268 |
| 841 | 2026841 | 3E-17 > sp\|P45844\|WHIT_HUMAN WHITE PROTEIN HOMOLOG (ATP- |
| | | BINDING CASSETTE TRANSPORTER 8) > gi\|1160186\|emb\|CAA62631\|(X91249) |
| | | white [Homo sapiens] Length = 674 |
| 842 | 2026842 | 3E-30 > gi\|3941462 (AF062885) transcription factor [Arabidopsis |
| | | thaliana] Length = 214 |
| 843 | 2026843 | 2E-62 > emb\|CAB43892.1\|(AL078468) UDPglucose 4-epimerase-like |
| | | protein [Arabidopsis thaliana] Length = 350 |
| 844 | 2026844 | 3′ 4E-52 > gi\|1708420\|sp\|P52577\|IFRH_ARATH ISOFLAVONE REDUCTASE |
| | | HOMOLOG P3 > gi\|1361992\|pir\|\|S57613 isoflavonoid reductase homolog - |
| | | Arabidopsis thaliana > gi\|886432\|emb\|CAA89859\|(Z49777) isoflavonoid reductase |
| | | homologue [Arabidopsis thaliana] Length = 310 |
| 845 | 2026845 | 5′ 6E-90 > gi\|4544391\|gb\|AAD22301.1\|AC007047_10 (AC007047) serine C- |
| | | palmitoyltransferase [Arabidopsis thaliana] Length = 582 |
| 846 | 2026846 | 5′ 3E-70 > gi\|3334202\|sp\|P93256\|GCST_MESCR |
| | | AMINOMETHYLTRANSFERASE PRECURSOR (GLYCINE CLEAVAGE SYSTEM |
| | | T PROTEIN) > gi\|1724108 (U79769) aminomethyltransferase precursor |
| | | [Mesembryanthemum crystallinum] Length = 408 |
| 847 | 2026847 | 5′ 2E-23 > gi\|2622773 (AE000923) ABC transporter |
| | | [Methanobacterium thermoautotrophicum] Length = 561 |
| 848 | 2026848 | 5′ Pkc_Phospho_Site (78-80) |
| 849 | 2026849 | 5′ 1E-42 > gi\|5262788\|emb\|CAB45893.1\|(AL080282) translation initiation factor |
| | | elF3-like protein [Arabidopsis thaliana] Length = 591 |
| 850 | 2026850 | 5′ 4E-53> gi\|3482919 (AC003970) protein kinase [Arabidopsis |
| | | thaliana] Length = 482 |
| 851 | 2026851 | 5′ Rgd (498-500) |
| 852 | 2026852 | 5′ 2E-14 > gi\|4759344\|ref\|NP_004715.1\|pZW10\|centromere/kinetochore protein > |
| | | gi\|2661164 (U54996) HZW10 [Homo sapiens] Length = 779 |
| 853 | 2026853 | 1E-115 > gi\|2642450 (AC002391) metal ion transporter (Nramp) |
| | | [Arabidopsis thaliana] > gi\|3169188\|gb\|AAC17831.1\|(AC004401) metal ion |
| | | transporter (Nramp) [Arabidopsis thaliana] Length = 509 |
| 854 | 2026854 | 1E-43 > emb\|CAA11219\|(AJ223281) alpha-hydroxynitrile lyase [Manihot |
| | | esculenta] Length = 258 |
| 855 | 2026855 | Zinc_Finger_C2h2 (564-586) |
| 856 | 2026856 | 1E-113 > gi\|3885334 (AC005623) argonaute protein [Arabidopsis |
| | | thaliana] Length = 930 |
| 857 | 2026857 | 5E-45 > emb\|CAA55395\|(X78818) casein kinase I [Arabidopsis thaliana] > |
| | | gi\|2244791\|emb\|CAB10213.1\|(Z97336) casein kinase I [Arabidopsis thaliana] |
| | | Length = 457 |
| 858 | 2026858 | 4E-11 > sp\|P38758\|YHG9_YEAST HYPOTHETICAL 57.0 KD PROTEIN IN |
| | | SOD2-RPL27A INTERGENIC REGION > gi\|626596\|pir\|\|S46784 hypothetical |
| | | protein YHR009c - yeast (Saccharomyces cerevisiae) > gi\|500703 (U10400) |
| | | Yhr009cp [Saccharomyces cerev |
| 859 | 2026859 | Tyr_Phospho_Site (516-523) |
| 860 | 2026860 | Tyr_Phospho_Site (242-248) |
| 861 | 2026861 | 1E-112 > emb\|CAA16600.1\|(AL021637) downy mildew resistance-like |
| | | protein [Arabidopsis thaliana] Length = 734 |
| 862 | 2026862 | 5E-51 > gi\|1575752 (U70672) glutathione S-transferase [Arabidopsis |
| | | thaliana] Length = 214 |
| 863 | 2026863 | Tyr_Phospho_Site (146-154) |
| 864 | 2026864 | 6E-49 > emb\|CAB39666.1\|(AL049483) peroxidase [Arabidopsis thaliana] |
| | | Length = 319 |
| 865 | 2026865 | Tyr_Phospho_Site (337-345) |
| 866 | 2026866 | 5E-41 > gi\|3927831 (AC005727) similar to mouse ankyrin 3 [Arabidopsis |
| | | thaliana] Length = 426 |
| 867 | 2026867 | 1E-27 > sp\|P51238\|YC39_PORPU HYPOTHETICAL 35.7 KD PROTEIN YCF39 |
| | | (ORF319) > gi\|2147564\|pir\|\|S73159 hypothetical protein 39 - Porphyra purpurea |
| | | chloroplast > gi\|1276704 (U38804) hypothetical chloroplast ORF 39. [Porphyra |
| | | purpurea] Length = 319 |
| 868 | 2026868 | Pkc_Phospho_Site (28-30) |
| 869 | 2026869 | Pkc_Phospho_Site (8-10) |
| 870 | 2026870 | 4E-19 > gi\|2352492 (AF005047) transport inhibitor response 1 |
| | | [Arabidopsis thaliana] > gi\|2352494 (AF005048) transport inhibitor response 1 |
| | | [Arabidopsis thaliana] Length = 594 |
| 871 | 2026871 | Pkc_Phospho_Site (30-32) |
| 872 | 2026872 | 3′ Pkc_Phospho_Site (4-6) |
| 873 | 2026873 | 3′ 1E-24 > gi\|2244744\|emb\|CAA74023\|(Y13676) bZIP DNA-binding protein |
| | | [Antirrhinum majus] Length = 140 |
| 874 | 2026874 | 5′ Tyr_Phospho_Site (383-389) |
| 875 | 2026875 | 5′ Pkc_Phospho_Site (96-98) |
| 876 | 2026876 | 5′ Tyr_Phospho_Site (644-652) |
| 877 | 2026877 | 5′ Tyr_Phospho_Site (574-582) |
| 878 | 2026878 | 5′ 4E-90 > gi\|2613141 (AF030547) beta-1 tubulin [Manduca sexta] |
| | | Length = 447 |
| 879 | 2026879 | 5′ Pkc_Phospho_Site (20-22) |
| 880 | 2026880 | 1E-128 > gi\|3928093 (AC005770) IVR-like protein [Arabidopsis thaliana] |
| | | Length = 276 |
| 881 | 2026881 | Tyr_Phospho_Site (519-526) |
| 882 | 2026882 | Pkc_Phospho_Site (23-25) |
| 883 | 2026883 | 1E-53 > sp\|P49625\|RL5_ORYSA 60S RIBOSOMAL PROTEIN L5 Length = 304 |
| 884 | 2026884 | 2E-95 > gb\|AAD15408\|(AC006223) glucan synthase [Arabidopsis |
| | | thaliana] Length = 1510 |
| 885 | 2026885 | 2E-14 > gb\|AAD14519\|(AC006200) protein kinase [Arabidopsis thaliana] |
| | | Length = 452 |
| 886 | 2026886 | 3E-61 > gb\|AAD48837.1\|AF166351_1 (AF166351) alanine:glyoxylate |
| | | aminotransferase 2 homolog [Arabidopsis thaliana] Length = 476 |
| 887 | 2026887 | Pkc_Phospho_Site (31-33) |
| 888 | 2026888 | 1E-122 > emb\|CAB37507\|(AL035540) probable H+-transporting ATPase |
| | | [Arabidopsis thaliana] Length = 487 |
| 889 | 2026889 | Tyr_Phospho_Site (91-98) |
| 890 | 2026890 | 1E-50 > gi\|927577 (U12927) alpha-galactosidase [Phaseolus vulgaris] |
| | | Length = 425 |
| 891 | 2026891 | Tyr_Phospho_Site (453-460) |
| 892 | 2026892 | Pkc_Phospho_Site (18-20) |
| 893 | 2026893 | Tyr_Phospho_Site (592-598) |
| 894 | 2026894 | 2E-14 > gb\|AAD17363\|(AF1 28396) contains similarity to Nicotiana |
| | | tabacum B-type cyclin (GB:D50737) [Arabidopsis thaliana] Length = 188 |
| 895 | 2026895 | 3′ Pkc_Phospho_Site (38-40) |
| 896 | 2026896 | 3′ Pkc_Phospho_Site (37-39) |
| 897 | 2026897 | 3′ Tyr_Phospho_Site (373-380) |
| 898 | 2026898 | 5′ 8E-11 > gi\|3123745\|dbj\|BAA25999\|(AB013447) aluminum-induced [Brassica |
| | | napus] Length = 244 |
| 899 | 2026899 | 5′ Pkc_Phospho_Site (86-88) |
| 900 | 2026900 | 5′ Wd_Repeats (494-508) |
| 901 | 2026901 | 5′ Tyr_Phospho_Site (573-581) |
| 902 | 2026902 | 5′ Tyr_Phospho_Site (943-949) |
| 903 | 2026903 | 5′ 4E-76 > gi\|541824\|pir\|\|S42867 protein kinase - spinach > |
| | | gi\|457709\|emb\|CAA82991\|(Z30330) protein kinase [Spinacia oleracea] Length = |
| | | 500 |
| 904 | 2026904 | 2E-44 > sp\|Q43062\|PME_PRUPE PECTINESTERASE PPE8B PRECURSOR |
| | | (PECTIN METHYLESTERASE) (PE) > gi\|1213629\|emb\|CAA65237\|(X95991) |
| | | pectinesterase [Prunus persica] Length = 522 |
| 905 | 2026905 | Tyr_Phospho_Site (630-638) |
| 906 | 2026906 | 9E-39 > gi\|2642429 (AC002391) poly (A) -binding protein [Arabidopsis |
| | | thaliana] Length = 662 |
| 907 | 2026907 | 3E-51 > emb\|CAA56521\|(X80237) mitochondrial processing peptidase |
| | | [Solanum tuberosum] Length = 534 |
| 908 | 2026908 | 4E-54 > gi\|3702343 (AC005397) homeotic gene regulator [Arabidopsis |
| | | thaliana] Length = 1245 |
| 909 | 2026909 | Tyr_Phospho_Site (284-292) |
| 910 | 2026910 | Tyr_Phospho_Site (608-616) |
| 911 | 2026911 | 1E-109 > sp\|P53492\|ACT2_ARATH ACTIN 2/7 > gi\|2129525\|pir\|\|S71210 actin 2 - |
| | | Arabidopsis thaliana > gi\|2129528\|pir\|\|S68107 actin 7 - Arabidopsis thaliana > |
| | | gi\|1049307 (U37281) actin-2 [Arabidopsis thaliana] > gi\|1943863 (U27811) actin7 |
| | | [Arabidopsis thaliana] Length = 377 |
| 912 | 2026912 | 1E-20 > emb\|CAB52812.1\|(AL033545) Ribosomal protein L7Ae-like |
| | | (fragment) [Arabidopsis thaliana] Length = 108 |
| 913 | 2026913 | 5E-47 > gi\|2275211 (AC002337) RNA helicase isolog [Arabidopsis |
| | | thaliana] Length = 748 |
| 914 | 2026914 | 1E-11 > ref\|NP_002026.1\|PFVT1\|follicular lymphoma variant translocation 1 > |
| | | gi\|544358\|sp\|Q06136\|FVT1_HUMAN FOLLICULAR VARIANT |
| | | TRANSLOCATION PROTEIN 1 PRECURSOR (FVT-1) > gi\|481027\|pir\|\|S37652 |
| | | FVT1 protein - human > gi\|296186\|emb\|CAA45197\|(X63657) FVT1 gene is |
| | | disrupted in a t(2; 18) chromosomal translocation involving Ig kappa gene in a |
| | | follicular lymphoma [Homo sapiens] Length = 332 |
| 915 | 2026915 | Pkc_Phospho_Site (17-19) |
| 916 | 2026916 | 1E-74 > gi\|2062156 (AC001645) jasmonate inducible protein isolog |
| | | [Arabidopsis thaliana] Length = 451 |
| 917 | 2026917 | Pkc_Phospho_Site (44-46) |
| 918 | 2026918 | 7E-83 ) > gb\|AAD26634.1\|(AF110407) ATP sulfurylase precursor |
| | | [Arabidopsis thaliana] > gi\|4803653\|emb\|CAB42640.1\|(AJ012586) sulfate |
| | | adenylyltransferase [Arabidopsis thaliana] Length = 469 |
| 919 | 2026919 | 2E-88 > emb\|CAA68164\|(X99853) oxoglutarate malate translocator |
| | | [Solanum tuberosum] Length = 297 |
| 920 | 2026920 | 1E-31 > gb\|AAD24822.1\|AC007196_8 (AC007196) unknown protein [Arabidopsis |
| | | thaliana] Length = 638 |
| 921 | 2026921 | 2E-54 > gi\|2660670 (AC002342) Cu2+-transporting ATPase [Arabidopsis |
| | | thaliana] Length = 925 |
| 922 | 2026922 | Tyr_Phospho_Site (707-715) |
| 923 | 2026923 | Tyr_Phospho_Site (806-812) |
| 924 | 2026924 | 5E-58 > sp\|P29830\|HS21_ARATH 17.6 KD CLASS II HEAT SHOCK PROTEIN > |
| | | gi\|71499\|pir\|\|HHMU17 heat shock protein 17.6-II - Arabidopsis thaliana > |
| | | gi\|16338\|emb\|CAA45039\|(X63443) heat shock protein 17.6-II [Arabidopsis |
| | | thaliana] Length = 155 |
| 925 | 2026925 | 1E-103 > emb\|CAA67156\|(X98543) endo-1,4-beta-glucanase [Arabidopsis |
| | | thaliana] Length = 493 |
| 926 | 2026926 | 3′ 3E-67 > gi\|2245394 (U89771) ARF1-binding protein [Arabidopsis |
| | | thaliana] Length = 454 |
| 927 | 2026927 | 3′ 2E-26 > gi\|4512675\|gb\|AAD21729.1\|(AC006931) citrate synthase |
| | | [Arabidopsis thaliana] Length = 509 |
| 928 | 2026928 | 5′ 2E-62 > gi\|2689720 (AF037168) DnaJ homologue [Arabidopsis |
| | | thaliana] Length = 284 |
| 929 | 2026929 | 5′ Tyr_Phospho_Site (270-278) |
| 930 | 2026930 | 5′ 4E-73 > gi\|3779021 (AC005171) reverse transcriptase [Arabidopsis |
| | | thaliana] Length = 1402 |
| 931 | 2026931 | 5′ 2E-27 > gi\|4091117 (AF047428) nucleic acid binding protein [Oryza |
| | | sativa] Length = 272 |
| 932 | 2026932 | 3E-38 > emb\|CAB10215.1\|(Z97336) ankyrin like protein [Arabidopsis |
| | | thaliana] Length = 936 |
| 933 | 2026933 | 1E-17 > gi\|3513744 (AF080118) contains similarity to Medicago |
| | | truncatula MtN3 (GB:Y08726) [Arabidopsis thaliana] Length = 249 |
| 934 | 2026934 | Pkc_Phospho_Site (96-98) |
| 935 | 2026935 | 3E-42 > gi\|3335371 (AC003028) ethylene-inducible protein [Arabidopsis |
| | | thaliana] Length = 309 |
| 936 | 2026936 | 1E-55 > pir\|\|S58496 IAA1 protein - Arabidopsis thaliana > gi\|972923 |
| | | (U18412) IAA10 [Arabidopsis thaliana] > gi\|3142299 (AC002411) Match to IAA10 |
| | | protein gb\|U18412 from A. thaliana. [Arabidopsis thaliana] Length = 261 |
| 937 | 2026937 | 4E-78 > gb\|AAD43920.1\|AF130441_1 (AF130441) UVB-resistance protein UVR8 |
| | | [Arabidopsis thaliana] Length = 440 |
| 938 | 2026938 | 9E-36 > ref\|NP002807.1\|PPSMD12\|proteasome (prosome, macropain) 26S |
| | | subunit, non-ATPase, 12 > gi\|1945611\|dbj\|BAA19749) (AB003103) 26S |
| | | proteasome subunit p55 [Homo sapiens] Length = 456 |
| 939 | 2026939 | 4E-84 > emb\|CAB45063.1\|(AL078637) hsp 70-like protein [Arabidopsis |
| | | thaliana] Length = 718 |
| 940 | 2026940 | Pkc_Phospho_Site (10-12) |
| 941 | 2026941 | 6E-45 > dbj\|BAA33810.1\|(AB018441) phi-1 [Nicotiana tabacum] Length = |
| | | 313 |
| 942 | 2026942 | Tyr_Phospho_Site (667-674) |
| 943 | 2026943 | 2E-82 > emb\|CAA61966\|(X89867) sterol-C-methyltransferase [Arabidopsis |
| | | thaliana] > gi\|1587694\|prf\|\|2207220A sterol C-methyltransferase [Arabidopsis |
| | | thaliana] Length = 361 |
| 944 | 2026944 | 4E-18 > gi\|4101718 (AF006465) B cell antigen receptor Ig beta |
| | | associated protein 1 [Mus musculus] Length = 653 |
| 945 | 2026945 | 1E-59 > emb\|CAB44689.1\|(AL078620) shikimate kinase-like protein |
| | | [Arabidopsis thaliana] Length = 305 |
| 946 | 2026946 | Rgd (366-368) |
| 947 | 2026947 | 3E-67 > sp\|P48000\|HKL3_ARATH HOMEOBOX PROTEIN KNOTTED-1 LIKE 3 |
| | | (KNAT3) > gi\|1045042\|emb\|CAA63130\|(X92392) KNAT3 homeobox protein |
| | | [Arabidopsis thaliana] > gi\|4063731 (AC006259) KNAT3 homeodomain protein |
| | | [Arabidopsis thaliana] Length = 431 |
| 948 | 2026948 | Tyr_Phospho_Site (333-340) |
| 949 | 2026949 | Tyr_Phospho_Site (206-213) |
| 950 | 2026950 | 3′ Pkc_Phospho_Site (49-51) |
| 951 | 2026951 | 3′ Tyr_Phospho_Site (858-865) |
| 952 | 2026952 | 3′ Pkc_Phospho_Site (58-60) |
| 953 | 2026953 | 3′ Tyr_Phospho_Site (65-72) |
| 954 | 2026954 | 3′ Tyr_Phospho_Site (710-717) |
| 955 | 2026955 | 3′ Pkc_Phospho_Site (28-30) |
| 956 | 2026956 | 3′ Pkc_Phospho_Site (14-16) |
| 957 | 2026957 | 5′ Pkc_Phospho_Site (98-100) |
| 958 | 2026958 | 5′ Tyr_Phospho_Site (914-921) |
| 959 | 2026959 | Tyr_Phospho_Site (1100-1107) |
| 960 | 2026960 | Tyr_Phospho_Site (333-339) |
| 961 | 2026961 | 7E-85 > gi\|1777443 (U28422) CCA1 [Arabidopsis thaliana] > gi\|3510263 |
| | | (AC005310) DNA-binding protein CCA1 [Arabidopsis thaliana] > gi\|4090569 |
| | | (U79156) CCA1 [Arabidopsis thaliana] Length = 608 |
| 962 | 2026962 | 1E-74 > sp\|P49625\|RL5_ORYSA 60S RIBOSOMAL PROTEIN L5 Length = 304 |
| 963 | 2026963 | Tyr_Phospho_Site (535-541) |
| 964 | 2026964 | 1E-112 > dbj\|BAA11944\|(D83531) GDP dissociation inhibitor [Arabidopsis |
| | | thaliana] > gi\|3212878 (AC004005) GDP dissociation inhibitor [Arabidopsis |
| | | thaliana] Length = 445 |
| 965 | 2026965 | 4E-73 > gb\|AAD25773.1\|AC006577_9 (AC006577) Belongs to the PF\|00657 |
| | | Lipase/Acylhydrolase with GDSL-motif family. ESTs gb\|T45815, gb\|T45130 and |
| | | gb\|Z38046 come from this gene. [Arabidopsis thaliana] Length = 426 |
| 966 | 2026966 | 9E-95 > gb\|AAC26009.1\|(AF076252) calcineurin B-like protein 2 |
| | | [Arabidopsis thaliana] Length = 226 |
| 967 | 2026967 | Tyr_Phospho_Site (1242-1249) |
| 968 | 2026968 | Pkc_Phospho_Site (2-4) |
| 969 | 2026969 | 1E-103 > dbj\|BAA36481.2\|(AB016256) NAD-dependent sorbitol |
| | | dehydrogenase [Malus domestica] Length = 371 |
| 970 | 2026970 | 9E-42 > gi\|3395433 (AC004683) peroxidase [Arabidopsis thaliana] Length = |
| | | 349 |
| 971 | 2026971 | Tyr_Phospho_Site (222-229) |
| 972 | 2026972 | 1E-12 > pir\|\|S57377 probable membrane protein YOL092w - yeast |
| | | (Saccharomyces cerevisiae) > gi\|600466\|emb\|CAA58187\|(X83121) orf 00929 |
| | | [Saccharomyces cerevisiae] > gi\|1419938\|emb\|CAA99104\|(Z74834) ORF |
| | | YOL092w [Saccharomyces cerevisiae] Length = 308 |
| 973 | 2026973 | Tyr_Phospho_Site (664-671) |
| 974 | 2026974 | 2E-61 > gb\|AAC62236\|(AF069737) notchless [Xenopus laevis] Length = |
| | | 476 |
| 975 | 2026975 | 5E-51 > sp\|P33157\|E132_ARATH GLUCAN ENDO-1,3-BETA-GLUCOSIDASE, |
| | | ACIDIC ISOFORM PRECURSOR ((1 − >3)-BETA-GLUCAN ENDOHYDROLASE) |
| | | ((1 − >3)-BETA-GLUCANASE) (BETA-1,3-ENDOGLUCANASE) (PATHOGENESIS- |
| | | RELATED PROTEIN 2) (PR-2) (BETA-1,3-GLUCANASE 2) > |
| | | gi\|322558\|pir\|\|JQ1694 pathogenesis-related protein 2 precursor - Arabidopsis |
| | | thaliana > gi\|166637 (M58462) beta-1,3-glucanase 2 [Arabidopsis thaliana] > |
| | | gi\|166863 (M90509) beta-1,3-glucanase [Arabidopsis thaliana] Length = 305 |
| 976 | 2026976 | 3′ Tyr_Phospho_Site (360-367) |
| 977 | 2026977 | 5′ 7E-29 > gi\|4176420\|dbj\|BAA37167\|(AB008097) cytochrome P450 |
| | | [Arabidopsis thaliana] Length = 524 |
| 978 | 2026978 | 5′ 3E-55> gi\|4835225\|emb\|CAB42903.1\|(AL049862) UTP-glucose |
| | | glucosyltransferase like protein [Arabidopsis thaliana] Length = 478 |
| 979 | 2026979 | 5′ 6E-79 > gi\|4895205\|gb\|AAD32792.1\|AC007661_29 (AC007661) alcohol |
| | | dehydrogenase [Arabidopsis thaliana] Length = 350 |
| 980 | 2026980 | 5′ Tyr_Phospho_Site (258-266) |
| 981 | 2026981 | 5′ Tyr_Phospho_Site (667-674) |
| 982 | 2026982 | 5′ Tyr_Phospho_Site (281-289) |
| 983 | 2026983 | 5′ Tyr_Phospho_Site (882-889) |
| 984 | 2026984 | 5′ Pkc_Phospho_Site (30-32) |
| 985 | 2026985 | 5′ Pkc_Phospho_Site (81-83) |
| 986 | 2026986 | Pkc_Phospho_Site (2-4) |
| 987 | 2026987 | 2E-88 > pir\|\|S39484 DNA-binding protein GT-2 - Arabidopsis thaliana > |
| | | gi\|416490\|emb\|CAA51289\|(X72780) GT-2 factor [Arabidopsis thaliana] Length = |
| | | 575 |
| 988 | 2026988 | 5E-85 ) > gi\|1532165 (U63815) similar to dehydrogenase encoded by |
| | | GenBank Accession Number S39508; localized according to blastn similarity to |
| | | EST sequences; therefore, the coding span corresponds only to an area of |
| | | similarity since the initation codon and stop . . . Lengt |
| 989 | 2026989 | 1E-37 > gi\|3738339 (AC005170) kinase [Arabidopsis thaliana] Length = |
| | | 607 |
| 990 | 2026990 | 1E-48 > gb\|AAD20708\|(AC006300) glucose-induced repressor protein |
| | | [Arabidopsis thaliana] Length = 628 |
| 991 | 2026991 | 1E-83 > gb\|AAD29799.1\|AC006264_7 (AC006264) triosephosphate isomerase |
| | | [Arabidopsis thaliana] Length = 315 |
| 992 | 2026992 | 8E-15 > sp\|O04395\|FLAV_MATIN FLAVONOL SYNTHASE (FLS) > gi\|2155308 |
| | | (AF001391) flavonol synthase [Matthiola incana] Length = 291 |
| 993 | 2026993 | 2E-12 > gi\|2795805 (AC003674) protein kinase [Arabidopsis thaliana] > |
| | | gi\|3355493 (AC004218) protein kinase [Arabidopsis thaliana] Length = 395 |
| 994 | 2026994 | Tyr_Phospho_Site (17-24) |
| 995 | 2026995 | 1E-55 > gi\|2795803 (AC003674) beta-1,3-endoglucanase [Arabidopsis |
| | | thaliana] > gi\|3355491 (AC004218) beta-1,3-endoglucanase [Arabidopsis thaliana] |
| | | Length = 549 |
| 996 | 2026996 | Pkc_Phospho_Site (91-93) |
| 997 | 2026997 | 2E-70 > gi\|3236237 (AC004684) ribotol dehydrogenase [Arabidopsis |
| | | thaliana] Length = 321 |
| 998 | 2026998 | Pkc_Phospho_Site (66-68) |
| 999 | 2026999 | 8E-33 > gi\|3738288 (AC005309) auxin-responsive GH3-like protein |
| | | [Arabidopsis thaliana] Length = 585 |

The application's sequence listing, which the Patent Office published only in electronic form, follows.

SEQUENCE LISTING (999 sequences)

SEQ ID NO: 1 - DNA, 521 bp, Arabidopsis thaliana
ttggtaaaagggttgagaaggatgttggtgattgttcttctgaagggagggctacggatgggctcacagcagaagaaggtgaactaatcaggaactttatgaagaatagtgcaagtcaattaaccttttgtggactctttcgcttgcaagaaggcctcaaagaacgtgaactctgtgtttttttccggaacaatcatttctgcaccatgttcaagtatgaaggtgaactttatcttttggctacagatcaaggttacctgaatcagcctgatttggtttgggaaaaactaaacgaggttaatggtgacactgcattcatgactgctaccttcaaggacttcacgatcgacagcagcacaggtggtgcaagtggcacatgggatgaacgaaacgcagtcacaaatactgctgattatcttgccagcatcaacaatgtagcggatgcaggcatagatgtcaattctgatctgcaactagcaatagctttgcaacaacaagagtttgaggaccagagcccacgt

SEQ ID NO: 2 - DNA, 521 bp, Arabidopsis thaliana
agctgtggaatcgtacttgcagcttattagcgaaccaaaacttccatccctgtttcttcaggtcatttcttgggttttgggagaatatggcacagctgatgggaaatattctgcctcctatattagtggaaagctgtgcgatgtggcagatgcatactcaagtgatgaaactgtaaagggttatgctgtttctgcactgatgaagatctacgcatttgaaattgcatctgggagaaaggtggatgttttgccggagtgccaatctttgattgaagagctattggcttcacattcaacagatcttcagcaacgtgcatatgagcttcaggctctccttgctctagatgcccgtgctgttgagactatactccctttagatgctagttgcgaagacattgaggttgacaaggatctttcatttctcaatggctatatccaacaagctatcgagagtggagcacaaccttatatttctgagagagagcgctcgggcatgtttgaaacaaccgattaccatcccc

SEQ ID NO: 3 - DNA, 521 bp, Arabidopsis thaliana
  misc_feature (1)...(521): n = A,T,C or G
aaaacaaaatcatgtctcgatttgctatcttagtaaccttggcacttgccattgccactgtttcggtggttatagctcaagtccctccggagaaacaattcagagtcgtcaacgaaggagaattcggtgaatacatcactgagtacgacgcaagttacagattcatcgaatcatcaaaccagagcttcttcacatcaccattccagctcttgttttacaacactacccctagcgcctacatcttagctctccgagtcggactcnngcgtgacgagtctaccatgcgttggatatgggacgcgaatcgcaacaaccccgtcggagaaaacgctacactctcactcggccgtaacggcaacctcgtcctcgctgaagctgacggacgagtcaagtggcagactaacacagctaacaaaggcgtcaccggattccaaatcttacccaacggaaacatcgtcctacacgacaaaaacggcaaattcgtatggcagagtttcgatcaccccaccgatacactcctc

SEQ ID NO: 4 - DNA, 521 bp, Arabidopsis thaliana
ttctagccaattattctgacaatttaccgttcccgtgtatttgctcgtgcacgtgtctgcgttcccgctatcctctctacattctcacgctccatcatgctatctcgtgtcactcgtgtattttccaacaaatttgcagctggctataagcaacagctagctgtatcatcctccatccgctcattctccgctagcactgccaatgttcctgttgttgagctaactgtgcgcatggacgacgagggcgactgggtaggcaaggtagagggcgaggaggtcatattcccagagcaggcggcaaccatcgagtgggtgctaagcacaccagtggacatgcacttgttcgaggagacaccgatcataaaggaggagccagagcacgaggaccatgaaagccactaaatcgtcaggtcattgtcatatagcgaaggcacaatgaacacggcaaatcccacgtacaacacagcatatcaattgaaaatgtaaagcaatatattatttatcgaaaaaaaaaaaaaaaa

SEQ ID NO: 5 - DNA, 521 bp, Arabidopsis thaliana
  misc_feature (1)...(521): n = A,T,C or G
agtacctgttcaagattgtcctaatcggcgattccgctgtcggaaaatcgaacttgctgtctcgattttcgcgggatgagttcgacacgaactcaaaagcgacaatcggagtggaatttcagacgcagctggttgaaatcgaagggaaagaagtgaaagctcagatctgggacactgctggtcaagagaggtttagagctgtcacttctgcttattacagaggtgcttttggtgctctcatcgtttatgacatcactcgaggtgacactttcgaaagcgttaaacgttggctccaggaactcaacactcattgtgacacggcagtggcacaaatgctagttgggaataaatgcgatttggaggatataagagcggtgagtgtggaggaagggaaagctcttgcggaggaagaaggattgnnctttatggaaacatcggctctggacgccacaaatgtagacaaagcctttgagatcgttatcagagagatcttcaacaatgtcagccgcaaacttctcaac

SEQ ID NO: 6 - DNA, 521 bp, Arabidopsis thaliana
ctttttttttttttttatcattactaaaacattttcatttctgttctttcagaaacatagattcggttattatcgtaagaaatctaatacaactgtgaactactacataaactgaattgttcaaaagaaaacatcgaaataatatacagaacaaaaagggaaaacaacaagagctgtgaaccacaaaggaattaaaccgggttttgactctccttattggaaccggaactaaaccgggatttcaatcctccttatcagaaccgtaatacctcttaaacgctctgggtagataaaccggaatcaaaacaccaaagagattaaacgaccaaatccctaaattagccgccgccaaaactttcccggcatacatccgccgcgcagaaaccgtccccgtcacatcctccctcgagaactcactcataatccactccacaagagtcaaaaccctcctggcgttgtaaacaatcggaacaagaatcctcgccggagcagagaagccaaacatggtcgctaatccttcc

SEQ ID NO: 7 - DNA, 521 bp, Arabidopsis thaliana
ggccgcctgaattacatgatagttactcattatcatggattttacaaattaatacggttaatctaataaaagttactcgaaaatgacatgatcattagcaaacaataattcacaactaggtgtaaagtttaagtatcttcctcttacgttgctattaaagacgtttccttagtgttcttgagacgttgaagcatcagttcgtagagagcgaatccgccatgatggcaacctggcattctcgatgtcatcatcttcagctcatcctgatcgattatttaaagcacatcaatgagacagtgtggagctgtgttgactcgaacccatcttcagcgctagagtataatctttgaatgtcatctgagtgatgactacacttgaggtagaaaaacatagctggtcttacattcaactcccttcgagatataccgatgaagagaggcgagctaagtgatgatgctggtattccagtttcttcgacaacttcacagataatgctatcaaacatttcttgagttaccttc

SEQ ID NO: 8 - DNA, 521 bp, Arabidopsis thaliana
ccgaaaacaaactttcatttcttatttttatcttaataaagttacataccatctttcttcattgtctttgttataaaataatagtctgtgaacatttacgaaccatgttcttaccttggtaatctcttgaataatatttttaaactgaaacgcgcaatactattaaaacgtaaagtggagtataatgctaaaagagatcagggactcaccttatgatctcgggaaactgcccaaactctcaacaatagctcaaaaactgaattcagaaatgacctgcatcagatgaagcccttgatttgagagcgtttaacacaaaaactggcagaaataaacagaacaaagaaagtggtctcacatgacatcactgtcaagcggagaatctgaggtaagatctgtgatgtatagccacactgcctgagaccagcacttaaatgctaaacacacaaagtcgataattagagtgcgaagatgtacagatcaacaggttaataacctacttttatgttagtatgaattatatt

SEQ ID NO: 9 - DNA, 521 bp, Arabidopsis thaliana
caggcacctctgctactttcagagcctccgtttcttcagctccttcctcttcttcccaattgacccatttgaaatcacccttcaaagctgtcaaatatacgcctctgccatcgtctcgctccaagtcatcatccttctccgtctcctgcaccatcgccaaggacccgcctgttctcatggccgccggatctgacccggccctgtggcaacgacccgattcgttcggtcggtttgggaagtttggtgggaagtatgtacctgaaacccttatgcacgctctatctgagcttgaatccgctttctatgctcttgccaccgacgatgatttccagagagagttggctggaatcttgaaggactatgtgggtagagaaagtcctctgtattttgcagagaggcttacggagcattacaggcgcgagaatggcgaagggcctcttatatacttgaagagagaagacttgaatcacacaggagctcacaagattaacaacgctgtggctcaggctcttcttgctaag

SEQ ID NO: 10 - DNA, 521 bp, Arabidopsis thaliana
caaagaagaagaatgttaatttcgtaaggccaagactcgaagagccaaagaatgaaaatattatgtaagtgagacaataatataccggaaaaaaaaatgaaatataatggtcgtgtggaaatcacttaacccaagtgactctcttttttcatctttgcttttgctgatgatgccgtgaaccgctctcaccactttcactaccggcagcaaccacagctgtctcttgtctctcgcggcttccatggtcccttgttgttcggcgttcatcgcgatagagtagatcttcggcttcaagcatatgtatgatatgacccattttaggtctcttgttcgcatcaggatccacacaacgcaaagctacaagcaacactcgtttaagagcctttgaggatggtggttcgggtattttcggatcaacaacttcttctgatcttcggtttcccaccattgatttaagccaatccactagatttgtctctccttgaggccgactataatcaaccgggtttcttccagtgatt

SEQ ID NO: 11 - DNA, 521 bp, Arabidopsis thaliana
ccacgcgtccgataagcttgaagataaggcgcttgattaccgtcctaagattcttatttgtggtgggagttcttatcctagggattgggattttgcaagggttagacagattgcagataagtgtggagctgttttgatgtgtgatatggctcatattagcggtcttgttgcaactaaggaatgttcaaatccatttgatcactgtgacatagtaacctccactactcacaaaggtctacgtggtcctagaggaggtatcatcttctacaggagaggcccaaagataagaaagcagggccatcactctagccattgtgacacttccacgcattacgatctagaggaaaagatcaactttgctgtttttccatctctacaaggaggtccacacaacaaccatatcgctgctcttgccattgcattgaaacaagtggccactccagagtacaaagcttacatacaacagatgaagaaaaacgcccaagctttagcagcagctcttcttagaagaaaatgcagac

SEQ ID NO: 12 - DNA, 521 bp, Arabidopsis thaliana
acgaaccacgaacgggaaatctctgtatccggtacactctcgtgtaccgttgattcgtagagatctatagacgcttgaatgaacaacggatcgggtcgggtcaacacttaacggatccgattcgacttcatcggtgtagatccaggttcctccgacttgtttttgtttctcgaaaacgaccaccgagtgaccttctcgtcgaagctctcgtgccgctactagacctgcaggtccagcaccgataaccgccacgtggtgtgatctgaagcaggtattgaagcaattggagccatggtgtgaacttaaagataaagtggttcttgtgacaggtgcttcatctggtatagggagagagatctgtcttgatctatgcaaagctggttgtaagattgtagcagcagctcgtcgtgttgatcgtctcaactctctctgttctgaaatcaacagctttggtgcaatcggagtccaagccgcagctcttgagctagacgtttcatcagacgcagacactattcgaaaag

SEQ ID NO: 13 - DNA, 521 bp, Arabidopsis thaliana
tgttaaatttccatttgatctccgtagggaagaaacacaaataggatccgatcaaaaggacaaaccaagagccaaaatggagaaagcagcgtctcttagttgtagcaaaggatacaagccataagtattacaaaatcaaggatattttctgtaactggaacagaacatttgatgtggttacatcatgtcttaaccggcctcacaagccccaaaccagatccactacccaaatgcttgtactccttagcctcaagatgatcgtcgtgctcagcgaaacccgtgcctcctttctttaacccaaccaagttcctatccttgcaaggtttgtcacacacaagacagactttgtcgacgggcataaacttctcagcacacttcttgcagaaaacatgtccgcatgagctaagtgccacgagggacattgtgttggtgagagtgactttgcagctcgggcagatgtaggatttatcataagagcttgaagatgctgattttgacctgcccgggcggccgctcgaggt

SEQ ID NO: 14 - DNA, 521 bp, Arabidopsis thaliana
tgaaagacgtctcgcctcatgacttcgtcaaggcttatgcttctcatctcaagcgatctggcaagatcgagcttcccacatggacagacattgtgaagaccggaaagttgaaggagcttgcaccatatgatcctgattggtactacatcagagctgcatctatggcaaggaaggtttacctgaggggaggacttggtgttggtgctttccgtagaatctatggtggaagcaagaggaacggtagtcgcccacctcacttttgcaaaagcagtggtggtattgcccgtcacatcctccaacagctggagacaatgaacattgttgagctcgacaccaaaggaggaagaaggatcacttccagtggccaaagggatttggaccaggttgctggccgtattgcagttgaaccttgaagatcttaatgttcttttttgttcttcttctacttttgaggccattgtgcttttagtgtttatctttacttttaagaattgttaccatttcattctcaaggcggccgc

SEQ ID NO: 15 - DNA, 521 bp, Arabidopsis thaliana
gatatgcaacgaatgaaggagttagaaaaatgactacaatggtggcagagttggcttttcagtgcttgcagcaagacaatacaatgagacccacaatggaacaagttgtgcacgagctaaaaggaatccagaatgaggagcaaaaatgtccaacctacgactacagagaggagacaataattccacacccttcgccaccagattggggtgaggctgcactattaaaaaatatgaaattcccacgttcaccagtctctgtgactgaccaatggacaagtaaatcaaccacaccgaataccagcgcctacgaattctaggatccaccaggtattggtttcttctcatttgtttcaatggaacgatataagatgaggcacagggttgtgaagcagtaggtaccgagagaatgtacatagtgacataacttgaactaccaatcaccaattttctatgtctaattttgtctactgtatgtaagattgaatcaaaaggtatttataaaaagaaaaaaaaaattgaca

SEQ ID NO: 16 - DNA, 521 bp, Arabidopsis thaliana
ccacgcgtccgcaagctccttaagcatcttctggcaggctccacaatactcactcatcggggcatcagaagtgttcatgtacgtgggtcagcttgagttcttcaacgcgcaaacaccagacggactaaagagcttcgggagcgctctgtgtatgatgtcaatgtcaatggggaactttgttagtagcttgttggtaacaatggtggtgaagatctcaacagaggatcacatgcctggttggattccaaggaatctcaacaaaggtcacttagacagattctatttcctcctggctgcgttgacgagcattgacctggtggtatacattgcatgtgcaaaatggtacaaacctatacaactagaaggaaaagatgagatgcaagacatgagtgatgatgactatgacaccgagagtgaagaggaacgagagaaggattctaaagtctaacaaatgtgtgtttggttttcagttttccggtgatgtaacagcaaactgattcataaataaaaggctaaatcgg

SEQ ID NO: 17 - DNA, 521 bp, Arabidopsis thaliana
ccacgcgtccgaagatgaacgaggggacgatatggagttggaaaacgtagatgatgatgatgataaccagattgctccatacagaccggagcttcatgatcatcagcaccaaccagatgatttctttgcagatcttgaagagctagaaggagattctctaagcatgttgctttctcatggctgtggcggcgacgggaaggataaaacgaccgcgtccgatgggatcagcaatttcttcgggtggtcgggagataataattataataattacgacgaccaagactcaaggtcgttatagtatagtgttaattacaggtaaacaaattatattaaattaagttgagcttgtgaaaatgaagatcatatggtctggtcaggttgggggtaatgactaatgagctggtacatgacagaccgtaaacagtatttatcgtcatttgttatacatttgttttttttcggaagatccgtctgtagttaaaaaaaaaaacggcattttttcaaaaaaaaaaaaaaaaaaa

SEQ ID NO: 18 - DNA, 521 bp, Arabidopsis thaliana
ttttttttttttttttgtaaatttgtatggtttattgatgtcttgtcttacatatgtatttgacattctctgttactgaaatgttaaaatatcgttgcatttactgtaagcaacacaaacatatcttcttattgattcattaaccatgcaaatccaaactcttcaaagatgtatgggatctatgagtaaggtgactatatactccttcaattttccttcactacaattgtatatatcatcggacttggtgtagaggacttccaataagcgtccaaaattgagggcttgcttgagaactcgacgtggcacggtggttgtttttagtagctcctcatttactatcttattgatgtctacgaccattttttgacactctagaatagcttcttctttggtaactacgaattgcttcatataatagttgatcgcatttgcagcaaacccattactcatgtcgctctcgaaatcagttatatcgtccatcagacgaccctttgcagctagagatttgattagtcttg

SEQ ID NO: 19 - DNA, 521 bp, Arabidopsis thaliana
  misc_feature (1)...(521): n = A,T,C or G
tgaaatttgtaatgatattgatttgcgagagtgaatacattattaacgagaagaagatgattcttctttattagttcacaatattacaatctgtcaagttgtcatatcttcttgtttaaggaatttgtcaaaccagtctgatgattctttgatcatgaaactcgtcgcttcgtgtccaactccatcttctgctttgaacttgaagtttccaggagaagctgtttccttatacgccttttcagctctctttaacgcaagttctagtccgccaagaggacatcgaggatcatttgcgccgttaaggatgtaaagaggccgtggagcaatcactggtaatgagtacggtgaatcaaacttcgaagctaggccaggagctattctgttccacaccttctcgactagttctttgtcgattatgttctttccgagatcaatccttgcttcttcaaataaagnnntgatactgttgactcttgcttcccactcatcattctctattgcccatctaaaaccctgaacac

SEQ ID NO: 20 - DNA, 521 bp, Arabidopsis thaliana
  misc_feature (1)...(521): n = A,T,C or G
gccctttttttttttttttagatgaaactcatgaaataaaactcattactcgattgtaaccaaaatggttaagttcagaccaaacactcnnnntcatctattagtcgatatggttgagttcagaccaaacacacacattcatctattaatcaatttggttaagttcagaccaaacacacacattcagtcattaatggatatggttaagttcagaccaaactcattaatcgataaaactcacaacaatacatacatttaaagcatttggtctcttccacaattgatgttggcaccatttctattcttcccagtcctcttggtaagagctcatgagatagccacatgatagaagctcctggtgttacaaagaattgaacaatataaccacaagatccggtttgaagttgacttggtgaacaatctcatcgtcgatcatcattccggcggttgtatattgagtatatgtggttgctctcccgatttcacggacgcgtgggtcgacccgggaattccggaccggt

SEQ ID NO: 21 - DNA, 521 bp, Arabidopsis thaliana
gaatcaacgaggacgactcaagaattatacacacatcaaaagatccttcgtatttctcaatcttgaattcttccatacaaaatccaagattctctgttctcgaaacacctaaaccggtttcaatcatcactccggttcaagccaccgatgttcaatctacgattaaatgcgcacggcttcacggtatacacatcaggactaggagtggtggtcatgactacgaaggtttatcttacatggctaaaagcagaccgttcgttgtcattgatttgagaaatctccggtctattacattagatgttgataaccggaccggttgggttcaatccggagctacaattggggaattgtactatgagattggaaaattaagcaaatctttggcctttccggccggtctttatccaaccgttggcatcggagggcaattcggaggtggtgggtacggtacgttgatgagaaaatacggtttatcggcggacaatgtaattgatgcacatattgttgacgcgaatggaagc

SEQ ID NO: 22 - DNA, 520 bp, Arabidopsis thaliana
tttttcactgttaacttatcgatattagacagaaaactttcaacagcgaaatacaaaacaagagagagaaaactaaaagacactcatctacaactcaaaatgcgcaaaagaagcagttaaaaaaggcgttgtcacgccgcaagggttaagatttggtatttcatcctaggcctcgaacccttacatctccgactaacgccggtataagacggtttgctactactcccgagcccgtttagaaccagcttttctggttctggacgtaggaggcaacactttgtgtgggacatataagggaataggcaaatgaagtttactcccagaagccaaagcagggaacccaacagcagggattccaacaagagcacagcagactcctgcttcgacatcatggtagtattattgccattacccttttgcaaacagtaacgtagagactggttttcagcaacgaagcactcaagcatacgtcctagtctcaagcattctctttcgagatacttactcttcttctctaaat

SEQ ID NO: 23 - DNA, 520 bp, Arabidopsis thaliana
tttttttttttttttttagagaacagattagatagcttgcaacacaagtcaaacatatacatatacatatacgagagattgacattgaaacgaatcatccaaagaagcttgggtcgtatccattgctggaagtagccaagatgtagtaagcaacgatgtgtccaatagaaccccaagcaagaacatcaacaatgttgaatccaattggatcgttcgatttcaagagactgacgtactccttagcacgatcatctccagcttcgaaatgggtttttccgttctgctccggtaagccctgttttgctacgttctctctctggaagttgaagaagacgaaacgaccgaggaagagggagagactgtgctgagacttatgacgatggaagggcttagctcagctctcacgacagtggaggaggattttctcccggtggttgatagtttgggtagggcggaggaggagccacctagacggaggggacgaaggccatggaatgagatggagttagggtttttgtgg

SEQ ID NO: 24 - DNA, 520 bp, Arabidopsis thaliana
  misc_feature (1)...(520): n = A,T,C or G
ttttttttttttttttttttttttttttttttttttttttttttttttagagaagtaaaatgccaaagaaaggctttgtttgaatcactatatatgttacaaacctagccacaaccaaaggagaaactaaagagcaggacaaggtattttgaaaagaaaggagcaactcacaggtacatatagattacggtttctctctctctgtctctttatgatccccagtttggtatgttggccgtggcttcatttatcatcttcactagtgttaccacactttgtgaaacaccaggtggaggcattgtaaggttccttggtggtggtttgctatcatacgatcttttgtcaaatctccattccccgattttcccataagttaatttacccttcatatcataatcacatccataagtgtagtgtatgatgtacttgtcaccaacctctatatcccatggngnntgaatcatgaagtctttgtgtagaatattgctaacaccatgcaatgcagatgagacagcataag

SEQ ID NO: 25 - DNA, 520 bp, Arabidopsis thaliana
taagattgatgagaacgtggcgagagagattattaaccacagatcacttcgtcatcccaatataatccggtttaaggaggtggttttgacaccaacgcacatcgccattgctatggaatatgccgctggcggtgagctatttgagcgtatatgtagtgctggaagattcagtgaggatgaggcaagatactttttccagcagcttatctcaggagtcagctattgccatgctatgcaaatatgccacagagatctgaagcttgaaaataccctcttggatggaagtcctgctccacgcctgaaaatctgtgattttggttattccaagtcctcattgttgcactctatgcccaaatcaactgttggaactccagcatatattgcacctgaggttctttctcgcggagagtatgatggcaagatggctgatgtatggtcttgtggtgtgactctttatgtcatgctggtgggagcatacccatttgaagaccaagaggatcccaaaaacttcaaaaaaaca

SEQ ID NO: 26 - DNA, 520 bp, Arabidopsis thaliana
gagcggccgcccgggcaggtacctatatgaatgttacaaacttgcacgatgaaacataacaaaaaacaaactccaaaattaccattctgtttcatttcgagattttcgcagctaattctctaacaagcttagctgcaaccattgctgtcatgccgtcaacagtatcacgctgcgggttgaactcgacaacgtcagccccgacaacatctgcctgaaggttgtgtaagatgttaaggacgtcacggaaagagagacctcctggttcgatatgcgacactccaggtgcaaatgccggatcgagacagtcaacgtctatcgagatgtatacccccttcactccttcccctaatttcagattttccaacattgggcgatctttcgagaaggttcgcatctcatactgttctactccaaacctcttgccttgttcccgtccttcctggtttatcgatctgatcccaacctgtaaaagcctacgcgcatagccaccttccatgatacgagcaaaagaagatgcatg

SEQ ID NO: 27 - DNA, 520 bp, Arabidopsis thaliana
cggccgcctctgggtcgtcggaatttgagctttttaaaatcatgggaaattgttttgccaagaaccatggattgatgaagccacagcaaaatggtaataccactagatcagttgaagtaggagtaaccaaccaagatccaccgtcgtatactccacaagcgagaaccactcagcagccggagaaaccaggttccgtgaatagtcaaccaccaccgtggagggcggcggctgcagcaccaggactaagtcccaagaccaccactaagagcaattcaatactagagaacgctttcgaagacgtgaagctcttttacacattgggtaaagagctaggtcgtggtcaatttggggtaacgtatctgtgcacagagaattccacggggaagaagtacgcttgcaaatcgatctcgaagaagaagctggtgactaaagctgataaggatgatatgaggagagagattcagataatgcagcatttgagtgggcagcctaatattgtggagtttaaaggagcttatga

SEQ ID NO: 28 - DNA, 520 bp, Arabidopsis thaliana
taggagcttaggacagtgtagagtcgattggtctcagacggatcaagcttatgtccttaaatccgatatccccgtggtggggaaaaataacgtgcaggtgtacgtggacattaacggaagagtgatggagattagtggccaatggaacagcaacaagaaagcggcgaccaacagtgactggagaagcggccggtggtgggaacatggctatgtccgccgtctcgagcttcctagcgatgccgacgccaaatactctgaagctttcctctctaacaacgacgattactctttcttagagatccgaatccctaagataaattctaagaacaagttttaatctgatcatgtcgccttgacgagttttaactttagattcttttcgtaattttgttttctttagttaactattattatagatatgaaattctgtggtagagacacaatggatgaatgatatgttatatatacatactataaaatatatcaaatataacatatcgattataacaaatgatttatt

SEQ ID NO: 29 - DNA, 520 bp, Arabidopsis thaliana
  misc_feature (1)...(520): n = A,T,C or G
ttccccgactctacaacagacatgcaatgtggtacaccaaatcaacaaccacacacgagtcatcaatcatcaacaacaacaaccacaacaacagcggaaagggtggagaagtcgtgcacgctctccaccaccacccaacccgaagatcccccatcatcagcacaaagccaggcacacactcaacagaagaacaagagacgaaagaagcagaggagggaaggggaagaagagaagacgaggggacagaggagtgctcgaagagaggacggagcaggagacgaaggagaagaggaaggtgacgaaggaagggaggagacgcggattaaaaggtgacccagtcgtccggcgtggctgctttgcctgctccagcgggtgcaccgaatgcatcgtccttcttgtccttcttcttctccttcctctcccccgacgctcctgnnntgggtggaggggcgagcttcagtcctcccagtcctgcgctgattcctccgtcgctcttctccttcttcttgtccttggtctt

SEQ ID NO: 30 - DNA, 520 bp, Arabidopsis thaliana
cgtccgcaacaacgatgtcttgggacgatggatcacacgcaaaggtgaagaaagtgcagctaaccttcgatgagatcatctactcaatccaggtcacgtacgacggagccaccgctcttcaatcccagcttcgcggctccgttggtcccaaatctgctgagttcactttggctccggacgagtacataacggccctttctgcttacggcaaatcgttgagtacgcaagaagttattacggcgttgactttcacaaccaacaagacttcttatggaccttacggtaccaaatccggtttccagatttctgctccggaggccaccggtaaacagatctccggtttccttggtaccagcggcaatgttctcaacaccatcgacgttcactattctcccatacctactggaggaactggcaccggaggaactggcaccggaactggcaccggaactggcactggaactggcactggcaccggaactggcactggaactggcaccggaggaactggcactggaac

SEQ ID NO: 31 - DNA, 520 bp, Arabidopsis thaliana
cttttcttacccactactttactgagatcacagactatagtttcactgcggatatggagactgagcttgataacgtttctggtggtgtaactgaatggaaaggtctcctaagagactactggacacgattcagcgcatattgtaaacgtgttgaaaatgtccaacgctcacaggtggaaaaaatgttggaaaagaaatatgaggacgttctgttttctttgcttccttatcccagtaggacatgcccgagttgtatggaaggcaccttaagtttcaaagcaagtaagtttggtgcggggtatttcatcggttgtgatcagcacccttcatgcaagttcattgctaaaacgctttatggagaggatgaagatgaagatgatcctccaaagaataactgcgtagaagagcccaaattgctgggtcttcatcccaataccagtgagaaggttattctaaagtgtggaccctatgggcattatgtacctgcccgggcggccgctcgattctggcgcggggtacc

SEQ ID NO: 32 - DNA, 520 bp, Arabidopsis thaliana
ttttttttttttttttagtctaaatgcctaatattaataatacaacaaagtacaaaggtacaaagatacaaacgtcaaatgataatggactgaactacaacatagagagacattagttctaccaacacatacaacaaccactcataatgttaatgctacacctgaaatcacaacaaactcttcacgctctgtgctctgtacagaacgatataggttttaacagctcacggaagctgcagctccctgctgctgttgaacttgattcgcctccaagcttctgtttgtgtcttctgccttcatgtcgttactcttctcctctgctactgcagcttcggtcttcttgacatcagactcttgggtttcgttctccttatttgctgcagcttctgtcttcttctcatcagattcttgagtgtcattttccttattcgcctcagcttctgtcgtcttctcatcatattctttggattcttttcccttatctgcttcagcatctgcatcaaggttaggctcacccagg

SEQ ID NO: 33 - DNA, 520 bp, Arabidopsis thaliana
ccgcccgggcaggttctgaaatctcactttcacagtttgtgtctgtgcgataatggccatggcagagctctcaacccccaaaacgacgtcgccttttctcaactcttcgtctcggcttcgtctctcttcaaaattgcacctttcaaaccactttcgccatcttcttcttccacctctccacacaacaactcccaactccaaaatctcttgctccgtttctcaaaatagccaagctcctgttgctgtgcaagaaaatggattggtgaagacgaagaaagagtgttatggagtgttctgcctcacctatgatcttaaagctgaagaagagacaagatcatggaagaagttaatcaatattgcagtttcaggtgctgcaggaatgatttctaaccatcttctcttcaaacttgcttcaggggaagtatttggtccagatcaacccattgcattgaaactgctaggatcagagagatcaattcaagctcttgaaggtgttgcaatggaactggaggattcattg

SEQ ID NO: 34 - DNA, 520 bp, Arabidopsis thaliana
gacgatcaagggacagatcaacgaagctgaagaagcattagagaaactgttaagcatcaacaggaaactggtgacgaaagttcaaaatggatttgaaagatcagatggaagcaaatcatcaatggatcttgatgagaatgagagtagcagaaggaggaggatatcagaacaggcgagaagaggatcagagaagattggtaggttacagttggagatacagagattacagtttctgttactgaaactggaaggagatagagaggatcgagcaaaagcaaagatatcggatagcaaaacgaggattcttcttcgggattatatctatagcggagtgagaggtgagcgacgaaagaggattaaaaagcggtttgcgttttgtgggtgcgtgcaaccgcctccatctccttgatagttagaactgttgttgcaagtaagctaaataatgttcatgtgaatggaaacgtattgaagtttgatatgaaagagaaacacttttgctaaaaaaaaaaaaaaaaaaaag

SEQ ID NO: 35 - DNA, 520 bp, Arabidopsis thaliana
tcgagcggccgcccgggcaggttcgataatggcttctcttctaacaaaacccaaacccgttttcctctgttcaccatcgttatctccaagaactttgaacacagcaacaccgtcattgaatttcaccagaatttcattcacccatcaccaaaagcttgctcctttcaagcctcctagtctcgttgttgcattctctgaaaagggtttgaagagagatgtcaccacagctgctgcagcgacggagggagattacagaaggataatgttatctgatgtgttggtgaagaagaaggaaaaagtagtttggtgggagagagaatggaaagctatggactttggagctgttgctgtcgttttgtctatgcatttgcttagtcttttggctccgtttcaattcaattggagagctgtttcggttgcttttgggctttatatcgttacaggtcttctggggattactctgtctttccataggaatctttctcataaagccttcaagctacctaaatggcttgagtac

SEQ ID NO: 36 - DNA, 520 bp, Arabidopsis thaliana
gcggccgcttttcgtcgtcggagttttccgtcttgaactcattcctcccccggcagttgcagctggaacgctcgcgccatcgtaatcagtgctacttatatggcttgatcctatgtcgtacaacggtggaagctctgttcgccatctctcgagttttgatcgcaatccttcgatgctagattcatcgatgctccattcgctgagtattgaactttccgtttcgtgcgatctatctttcgccaatttgtcagccacttcagatggcgatggtcctaactccgattcagttaagattcgtcttccagctaaattcctcactggtgtaccaaaatcgtgatgagttctcatcggtgtagccatgtagtttgatcggatcggggttgatccgacgatgtttgatctcattggagtcgaaccaaccatgttagaccgcataggagttcgcattggagtcgatccaaccatgttgggatgcatcggtgacattgcgatgatgttggatctcataggagttgatcaa

SEQ ID NO: 37 - DNA, 520 bp, Arabidopsis thaliana
ttttttttttagtcaaatgttacatacaatatatattacaaatgaacataaacgacaaaccatcatcactccaagcactagacaaaaaagagtaagagaataggctagagactaattaaacatccaaatctaaccccaaacaattcaattctaaaagctaactcaaaatactagattaacttatcggaccaagtagtcaacgccaagaggaaacggtgaggagaggcacattgttccaagccaaggagatgaaacctggctccgattcaacaagtgaatacaatgtactataattgtagttccatagtagcagcttcgcttggctaaccgcgtaattactcggtttaaccggctcaaatccagctttctccatcaacactctccattgttctttctcctccattaacccaaaccgggttcccggtttattattatcatcatctgatcggaccaaatccataatcctcctaccgaacagcactctctccactctcagcctttctttcgaatctcgatccaa

SEQ ID NO: 38 - DNA, 520 bp, Arabidopsis thaliana
gcggccgcctctgctgtaaagtacgtaccttacgaagaatacagaaactttctgtctaaggaagatcctgcttatgtgccatatgatgttaatggagagtatggaaaactatttgacataatcagacagaggtgccaagtgaacactgaggcccgtagtttatctctgcagaagcaactccagagatattctccagtcaccctcgaagccaagttgacagaactttctgaagcagatcagaaagcgttgggtctaattgtgaaggctgcaaaaattatggacgatatattctatgagcaggtttggaacagcaatccagccctaagagattggctgaaggatcatgccaatgcatcaaaactggacaaactaaaatgggattacttcacgatcaacaaaagtccatggtcgtctcttgatgaaaatgaagcattcttgagtactgcggattcagctgtaaagttgcttcctggagcaacaaaagccatagctggctggaagggtcttgaatatagagcag

SEQ ID NO: 39 - DNA, 520 bp, Arabidopsis thaliana
tttttttgactctgaattttcaatagtaataatagtatctgaaaattacatctttagattttcaccttataatagctttatcttcctcagtgacaacaagctctccatcaacaaactcacaatacaagaaaggcaaaccaagctgcttctccatcttcttcactataaacacttgtgattcctcgcacactgttaccaccgtccctttccttcccagcctccctgttctcccagctcgatgagcatagtgaaccgcatcagttggaagctcaagattcaccaccagatcacattccgcaacatcaagaccccgagcagagagctcgtttgtcacaagtaccttgatttccccgttcttgaacttctttagaactgttgatctccctagcttcccgagatctccgtgcatctcagctgaattcataccacgagcttcgagtttgtagaccacatctttgagctgccttgagtggttcatgaaagctataaccgattgggcatcgagggcgtgaacgcatct

SEQ ID NO: 40 - DNA, 520 bp, Arabidopsis thaliana
tttggatccaaagctctcttaaatctgtaaatcaacaatggccgccaccactgagaatctccctcaactcaaatccgccgtcgatggccttactgagatgagtgagagtgagaagagcggattcatcagcctggtttcacgttacctgagcggtgaggcacaacacattgagtggagtaagatccagactcctaccgatgaaatcgttgttccctacgagaaaatgacccctgtctcccaagatgttgccgagaccaagaatctgttggacaaacttgttgtgttgaagcttaatggaggtcttggaacaacaatgggatgcactggcccgaagtccgttatcgaagttcgtgatggtttgacatttcttgatctgattgttatccagattgagaatctcaacaacaagtatggctgcaaggttccgttagttctcatgaactcgtttaatacacatgatgacacacataagattgtggaaaagtacaccaactcaaatgttgacattcacacttttaac

SEQ ID NO: 41 - DNA, 520 bp, Arabidopsis thaliana
atgctcatcattagagaagaaaggtgctagtgttgctgacacggttatcggagaggggaatacttctgcttggaggttgtgtggccttgataaaactacgtgtttgacgatattttttgacatatcttcaagcgggtcaaatactcctggagctgcgaatccacagttttatttgcagtttctcacaagttatcaaaaccctgaaggtcaaacattgctccgggttactactgtatgcagacagtggatagacagtgctgtgagttcagaggaacttgtgcaaggctttgaccaagaaactgctgctgtggtcatggctagattagcttctttgaaaatggagtcagaggagggatttgatgctactcgctggttagatcggaatctcattcgtctttgttcaaaatttggagactatagaaaggatgatccagcctccttcacgctgaatccctatttttcgttatttcctcaatttatatttaatctgcggcgatcgcagtttgttcaggtatttaac

SEQ ID NO: 42 - DNA, 519 bp, Arabidopsis thaliana
gactcattgcaggttacctataaacatgaggcaacggctaaatccgccactagaagaagagtgttttgggaatgtaagccaaaccgggatagctacggtcacggttggagagctgctggaccatggactaggctgggctgcaatgcaaatcaacaacatggagctgtcacaaactgatgaaaaagccaaagcatttgcagagaattgggtgaaaaatatcaagattccggtttctgttggtagcaaagatttagttgtcacaaactctcaccggttcgatgtgtactgtaatgatttcggttggggtaaaccgatagctgcaagagctggaccaccgtatctcaatggaagactcgttgttttcaaaggaattggagaagcaagtcttgattttcaggcttgtttactgcctcaggtagtggaaaaattagtcaaagatgctgaatttaacgaatatgtaagcattgtatgagatgatttggtttagcaatgtgaatttaactaagccaaaaaaaaaaa

SEQ ID NO: 43 - DNA, 519 bp, Arabidopsis thaliana
cggccgctaattacatcataatgatgtttacaatgagaaagagtaatatcatctccaatctccaatggttacatctcgaatttttggatactataatatgtttgccatgttctttttttggcaacattgtcatgttcactataagacttttctagtttccagtctcatttggctttttcacttgggtcactaactatgcacaaaagcttcatataaaaccacattcacatgcatgttgttatatctctggaccagatgcgaacagaggtataaggccacgcaatacttgggctgataattggtgagcctcaaagatctctccgtccaaattccacacactctcttccccaaatgatgtaaacgtgaaagctcgcgtcttgtgatattccacaaactcgaagttcaaaggttctccacctctttttgcaagctcggttaggtgccataagtacttgggacgagaacaatcttttatgagtatgagatgaaggaaaccgtcggagaggtgtgcatccacaa

SEQ ID NO: 44 - DNA, 519 bp, Arabidopsis thaliana
  misc_feature (1)...(519): n = A,T,C or G
cgtccgaaaaaaccctaatcttctcgggcttgtcatctccaaaattcagggttcaatttcttcaccatagaagatatagcgttatctccggcgtctaaggggactttagggacattcttgtggtggagaaatgggagacgaccagctagatttcgagctcccagaagaggttttgtcggtgattccgatggacccttttgagcagctggatctcgcgaggaagattacatcaatggcgatagcttcaagggtgtcgaatctggactctgaggtggttgaattgagacagaagcttctgggtaaggaaagtgttgtccgtgagcttgaggagaaagcgtctcgcctggagagagactgccgcgaggctgattcgagattgaaggtcgttctcgaagataatatgaacctgacaaaggannnggattcactggcaatgactgtaacgaaactcacccgtgatttggctaagctggagacattcaagcggcagttaatcaaatccctgagcgatgagagtgg

SEQ ID NO: 45 - DNA, 519 bp, Arabidopsis thaliana
ccggatttatgcccttctggaaattgctcttacgaaaaatctggagggaacgataccctgggaaatttccctatttgtggaaaggatgttccgcgtggatactacatgttttgccgtggcagcaagaacgatactcgcggatttagctgtggattatgggttctgatgcattcgctttccgtgagaattgaggatggagaaagtcattttgcattcacgacaatatgcgatttcgtcaacaacttcttcatgtgtgatgaatgccgcctgcatttcaatgacatgtgcttgagcgtcaaaacccctttcaaaaaggcacgtgatttcgtattgtgggtgtggagcacacacaacaaggtcaacgagagactcatgaaggacgaagcttcccttggtacaggtgaccccaagttccccaagattatatggccaccaaaggagctttgcccattgtgttatctttcaagtaatcagaaaagcatagagtgggaccatgaacatgtctacaagttcttgaag

SEQ ID NO: 46 - DNA, 519 bp, Arabidopsis thaliana
agaataaaagataagaactttgacgttttgaagcttaaagcttgaaacttgtttcatccatggcggctcgtagagtgtcttctcttttatctcgatctttttcagcttcctctcccttactgtttcgttctcaagggagaaattgttacaatggagggatcttaaggagatttggaacctcttctgctgctgctgaggaaatcataaacccatctgttcaagtttctcacacacagctcctcatcaatgggaactttgttgactctgcttctggtaagacgtttccgactcttgatccgaggacaggcgaagtcattgctcatgtagctgaaggcgatgctgaagatatcaatcgagctgtgaaagctgcaaggacggcctttgatgaaggaccttggcctaaaatgagtgcttatgaaaggtcaagagttttgttgaggtttgcagatttggttgagaaacacagcgaagagctcgcgtctctagagacatgggacaatggcaagccttaccaacaat

SEQ ID NO: 47 - DNA, 519 bp, Arabidopsis thaliana
cgtcaaccacacgtccaccgccaaaacagaaccccatcactcctagcttcttggagattccagccgctgcaaattcctcaaccatccattttgtgaaggtagtagtgtcttgtctgatacggttagggtcatgtcctcttctccattcctcgtattcggactttggtcggtttttcgaccatggatctccacgaaacaagtccgggacaagaacgctatctcaaccaaaaaatcaaaaacacaaaactgaaatttcaacaatgaactttggaattcgagagagataagtaaacagagaagattgattacttatagccattgcaagccacacggtaagcgaaatcgcgtgtagctgaatcttgaaagccaaagacatcagagagtagaagcaatccagttccgttattgttcttcaccgccgttaaaagataaccttcaacaccgtcaacggacacttctgttccgttaacaagctcacacgcttcttcttcctcatcatcatcgacctccacgttaatg

SEQ ID NO: 48 - DNA, 519 bp, Arabidopsis thaliana
atcgaggagctgcaacagattgagcaacagcttgagaaaagtgtcaaatgtattcgagcaagaaagactcaagtgtttaaggaacaaattgagcagctcaagcaaaaggagaaagctctagctgcagaaaacgagaagctctctgaaaagtggggatctcatgaaagcgaagtttggtcaaataagaatcaagaaagtactggaagaggtgatgaagagagtagcccaagttctgaagtagagacgcaattgttcattgggttaccttgttcttcaagaaagtgatctccactcaacaaaaaaaacaaaaaaacaaactaagtaaaaacaggtttagcagtactgagagtgtataaggacaagtaacaaaactctaaagctgcttctctcttgttgtcttatttctctctcactctctctctctcagtcacttctttaatgattctgaactgcttgtgttatgtatctatgttcttacacttgcctctctagaatgtaattttgattatgttttaaaaa

SEQ ID NO: 49 - DNA, 519 bp, Arabidopsis thaliana
gaggaatcgtctggctctccaaacatgtatgttcatcatcacataattataccagaattcccattgtgtactgcatggcttgattgtcctcttaaaggaggggaaaaagggaattttgtagctattggttcaaaggatacaccgacaatcgagatatgggatcttgacgttagggacgaggtgctaccttgtatacaactaggaggaatagaggagatgatagtgagtaagaaaaagaagagcaagaaacagaaaccgaaattcaaagaaggtagccatactgagtcagtacttggtcttgcttggaacaaggagtttcggaacatacttgctagtgctagtgccgacaaaaaagttaaggtctgggatgtggctactgggacgtgtaagattactatggagcatcacacaaaggaggttcaagcggttgcttggaaccattatgctccagaagtgcttctcagtgggtcgtttgatcaaactgttgtcatgaaagacggaagacaaccttcacactcg

SEQ ID NO: 50 - DNA, 519 bp, Arabidopsis thaliana
ttttcgatttcactgacacgattaagaatgctagagacaaggagattaagaggcaaacgttgttggagctggtggattttatacagtctggatctagtaagatctcagagtcgtgtcaggaagaaatgattaagatgatttctgttaatattttccggtctctcccaccagcatcacacgagaatacgggtcaagagcctgcagatcctgaggaagaagaaccttatttggaaccttcttggcctcacttacagctagtttacgagttgctcctgagatatgttgtttcgactgacactgatacaaaggtggccaaacggtatatcgaccattcttttgtgttaaagttgctcgatttgtttgattctgaggacccaagagagagggagtatttgaaaacgattcttcataggatatatgggaagtttatggtccacagaccctttattaggaaagcaatcaacaacatattctataggtttatttatgagacagagagacacagtgggattggggaac

SEQ ID NO: 51 - DNA, 519 bp, Arabidopsis thaliana
tctctctatcacactactactactcacatcatggctttctccactagaggctccctcttattcttcttcactacacttgttcttctctccacccaaatccatgcaagagacagttacttctttggaaaattccacagagaatcccccaaagatcaaaaccctaacagtttcatccctcttgagactagcgagaaaaccacagtagaagaatccgtcctcaacaagaaagagcaagaacaagatcctacctttgtccccgagtccggaaacgggtatggcttgtatggtcacgagaccacatacaacaacaacaacgacaacaaagaagagttcaacaacaacaacaagaacgatgaaaaagtcaacagcaagactttctccactccaagcctgagcgagaccgaagagtctttcaacaactacgaggaaaattacccgaagaagacagagaactacggcactaaaggttataacaatgaggagttcaacaacaacaacaacaagtacgatgcaaacttc

SEQ ID NO: 52 - DNA, 519 bp, Arabidopsis thaliana
tttttttttttttttttttggcagagctaaagatcggttattattctcataaattgcatctcatatcatacaatgttatgaattctcaataaatgcagagcaaaacaaaacatctcaaggtcaagatgtgatcaaatattaagctgaaagataaagagttaacattagcctcgtcaccacaatgcttttttaagttagctccataacttttgctgtcttcatgatgcaaagacccgttgacgagtggaaacatgagcttgagacttgacggatacatgagaaacaataggcttcaacaatgccttcacttcctccggtaaatcgagttgcttcctaacctcattcgctaactcaatcacatactcttcctcatgctcaatgtcgaacattgctttctctagcttgaaaagatactctcggttgttcccacaaggtcccgaagccgtagcgatttgcctcgccatttcttccaatggagctggacctaagtagtatttgttcgacacttcggacgcgtgg

SEQ ID NO: 53 - DNA, 519 bp, Arabidopsis thaliana
gggtgttatctggatattccgactgatgtgttgcgtcagaagatatcggaatcggaagctgataaattggtggatgaggttgagagatcacggaaggaagaaccgattcgtggatctctgagatcggagattgaatcggcggtttcgttgctgaggaaagctgagaggccgttgattgtgtttggtaaaggagctgcgtattcgagagcagaagatgagctgaagaagcttgttgaaattactggaataccctttttaccaactccgatgggtaaaggtttgttaccggacacacacgagttctcggcgactgcggcgaggtctcttgctattgggaaatgtgatgtcgcgttggtggttggagctaggcttaactggcttcttcatttcggagagtcgcctaaatgggataaagatgtaaaatttatattggtggatgtctctgaggaagagattgagctaaggaaacctcatttggggattgttggagatgctaaaactgtgattggattgttgaat

SEQ ID NO: 54 - DNA, 519 bp, Arabidopsis thaliana
ttaaaccctttcttctccaccactctctcctcttcgaagaagaaccaaattgcatactcgggaaacagcaagaatcagacatcgtcgtctctgttattgaaaagaagggaactgtcgcttggatttatgagcagcttagttgcgattggtctcgtgagtaatgacagaagaagacacgacgcgaatgcagcgattcttgaagctgatgacgatgaagagcttctcgagaaagtgaagcaagatcggaagaagaggattgagagacaagctgttcttaattctgctgtcaaggaaaaggggtatttgcaggatcttgtttacaagttgagcaaggtaggacaagccattgagaacaacgatctaccagctgcaggattggttttggggaaaggcaatgataccgaatgggtcaaaaccgttaatctggctttcacaaagttgagtacaagcccagaagagaatacagaggtggaagcattcaattcatcattggcttctcttatcacatcagtgaacaag

SEQ ID NO: 55 - DNA, 519 bp, Arabidopsis thaliana
agctcagactagtgaaaccgagaagaagctaaacgaattgaactcgagagtggagaaacttcacaagacaaatgaagagcagaagaacaaaatacgaaaacttgagcgtgctcttaaaatttctgaggaagaaatgttgcggacaaagcatgaagccaccacaaaggctaaggaactgatggaggttcatggggcgtggcttcccccttggtttgctgtacactggagtagttttcagactgttgctgggacacactgggacgcccacggcaaaccagttatggagaaagttactcaaaaggtgacgttagcaaaaaatcaagctgaaaaatgggctaaaccgcacatggctaatgttaaaactaaatatattccagccataaaagagactgttaaaacgcatgttgagccacacgttcaaacactatctaccaaagcgaaagaggcttaccatgcttccaagagtgcggttacaccacatattgtcaagtttcaagaacatgtagatccctattacca

SEQ ID NO: 56 - DNA, 519 bp, Arabidopsis thaliana
  misc_feature (1)...(519): n = A,T,C or G
ctcttttggtctctccccttctccggagagatctgctctctctatctatctctcaatctgtaagaagaagattcccacttcagtaaaagccctaactttacttgggaaagttcttcatctatcatccttcaatcgtcatcatccatggctgatcaacaaaccctagattcctctactcctcctcctactcaatccgatgatctatctcactcccactctacttcctctactacttcagcttcttcttcctcagatccatcactcttgaggtctctctccttaagtcgactcaacgccggagctcctgagttcgttcctggtcgaactactcctccgctgcctcaacctccgaggatgattatcccgcctcctccgccgcacggtatgcttcatatgtatcaccaccagcctcctttcaatactccagttcttggtcctgttccaatccagccacacttggttcctgtnnaaaatcaccaccctcatcatcgctttcatcagcatcatcatcacaatcgt

SEQ ID NO: 57 - DNA, 519 bp, Arabidopsis thaliana
  misc_feature (1)...(519): n = A,T,C or G
gagcggccgcccttttttttttttttttttttttttaacacaaaatattatttatttacatataaattaaagccaatgtgactacaacaacaattacaacatgatccttttgcctataaagccgccatggccgtacactcgagatgcctcggacatgtgatcaagtggtcgttggttaaaccggcggcttgcattaacgaatgtataaccgtcggaccaacgaatctaaacccacgacgaaccatgtctttgcttatagtctccgatttcgatgtcttaaccggtatcttttggcatgatgtgtattttgtggtgaccggtttgtgtttcataaacccccaaatgtatttgttgaatgaccccaaatctcttttcaccttgagaatttgtttagcgttgtcaacaactgcaaggacttggctaaggttaatgccatagtcgttgactattgattgnntcttcttctcgttgaagtctgcgaccaactctgcttcgaaaccagagaaagcctctctaaaa

SEQ ID NO: 58 - DNA, 519 bp, Arabidopsis thaliana
  misc_feature (1)...(519): n = A,T,C or G
gcggccgcttcagcttgaatttcggatttggtgtgatttgttgagacattgatttgatgaggctggtttggcaaagcgttggtttgcagcggctggttcgttgagatggagactttgatttggaggttcaattgccgttcggtttgaagaggaggagcttcgttcggtttacagcggcttggttcggtgaaatccttgttcagcgaggagaagaagcgtgcggatcggttcggcgagaggggaacttgaattggcggcaaaatttgacaatctatttggactctcttggttcggtgataagaggaggagtaagcctggttaagaggaggaggaggaagcttggttcggtgagaagtgagaagaaggaaccggtttggtgagaagaggaagaaacctaccggttcagccaaagaagaaggaaaccggttcggtgagaggangagatttgcggttcggtttggtaggacaaccggtctggtttgggacgatggaccgtagttggtttgatttgaatggtta

SEQ ID NO: 59 - DNA, 519 bp, Arabidopsis thaliana
  misc_feature (1)...(519): n = A,T,C or G
ttgaatgagattgtaacgtctggcacaaagatgatagacgacgaccaagtctcctctgaagatttcccttggatgactgatggagctggacttcctcccaacgctcatgaactcctacgtgaactggtgaaattaactaagaatgtgactgaacaagtaagactacttgcaatggatgaagacgagaacctcactgagccatacgatataattcctccatatgatcaagcaaaagcccttggcaagacaaacattgacagtgatcggattgcttctgggttaccatgtggtagtgaaggattccttctgatgtttgctcggtggataaaacttgctagggatctctacaatgaaagaaaagaccgatttgacatcacacagattccggatgtttacgattcatgcaagtacgacctgttacataattcccatctcgatctaaaaggattagatgaactnnnnaaagtagcacagttacttgcagatggtgtaatcccaaatgagtatggcatcaatccg

SEQ ID NO: 60 - DNA, 519 bp, Arabidopsis thaliana
  misc_feature (1)...(519): n = A,T,C or G
ccacgcgtccgcacaatccatcacatccatttcaatagaagacgaagaacgtttcagaatcatcaaccaaattcagaaaatttcagccatgacaggatcacaagaagaccaacctaagatcatcattgatcaagagcaacccaaaactctagaaacagagcaccaaccagaaccttcttcatcgtctccggatcagaagaaatggggtactcacgtgatgggagctccggcagctccagttgctcatcccgataaccaacaggcgnnggcgtgggtcgctggagataaccagcagacgcagtatcaaccgtacgtcatctactctcctgtcgaacatccaacaactaacaaccctctcgagccagtcatcggaatgttccatacctggagtcgcaaggcagaaaccgtcgcacgtaacctcnggcacaatctgaagacaggaccgtctatgtcggaaacggcgtgggggaaggttaatttgacggccaaagcgataacaaaaggaggattcgagtcgct

SEQ ID NO: 61 - DNA, 519 bp, Arabidopsis thaliana
agggaaaatcgagtgacaaaattcatgctggtctcattcttgtattggcgcagctctctgtcttcatcgaacaaaaggtcatcccgagagttactgaggaaatagctgcttccttctctggtggaaattcccaagcctttgagaatggacctgcttttattcctggagaactttgccgggtcttccacgcagccagcgagaaacttctccagcattacatagacacaagaacacagaaggtatcagttttactgagaaaaaggttcaagacacctaactgggttaagcacaaggagccacgagaggttcacatgtatgtcgatatgtttcttcacgagttagaagaagttggtaaagaagtgaaacaagttttacctcaagggactttccgtaagcacaaaagaacagacagcaacggaagtaacactacaacctcatcacgaagcaataccctccataatgataagatggcacggtcaaattcacaaagagctcgtagtcagcttttcgagacacatc

SEQ ID NO: 62 - DNA, 519 bp, Arabidopsis thaliana
ccacgcgtccgaaaaaaaacaatctagcaacagaagaagcttcgagaagacgatggcgacggagacgaacgagaatctgataaactccttcatcgagatcacttcttcatcaagagaagaagctaatttcttcctcgaaagtcacacttggaatctagacgctgccgtttcaactttcctcgataacgatgccgccgcagccgccgaaccaaaccctaccggaccaccaccaccttcttctactattgccggtgcacaatctccttctcaatctcactctcccgattacactccgtctgaaacctctccctctccttcccgatcacgatctgcttctccgtcttctcgcgctgctccctacggtctccgatcgagaggcggtgctggagagaataaagaaactgagaatccgtcgggaattcggagttctaggagtcgtcaacacgctgggaatatccgtacattcgccgatctgaaccgttctccggctgatggcgagggcagtgattcggatgaagc

SEQ ID NO: 63 - DNA, 519 bp, Arabidopsis thaliana
  misc_feature (1)...(519): n = A,T,C or G
cggccgctctctcccctaggttaactcaagtgggtttatcatcaaagaagccttttttgattcggcncnnntctcctgttgatcgttactcttttcccagaatgttaacggagaggtgtttgagcactcgtcggaagtttaatcgccatggaatcgctgtggtgaaggctgcgagtttagataaggttagcggcgcaatcaaaccaggtggattggtggagagtgacaagttgccgactgatgtacggaaacgagcgatggatgcggtagatgagtgtggccggagagtaactgttggtgatgttgctagtagaggtggcttgaaggttactgaagctcagacagctcttcaagctatagcggctgatactgatgggtttttggaggtgtcggatgaaggtgatgtgctttatgttttcccaagggactatcgaactaagttggctgccaagtcgttaaggatacaaattgaaccattccttgaaaaggcaaagggtgctgtagattatttggctcgtg

SEQ ID NO: 64 - DNA, 519 bp, Arabidopsis thaliana
  misc_feature (1)...(519): n = A,T,C or G
ccacgcgtccgtttccaattgggagaagaagaagacgacgatgaagcatttatctgattctgggtctgttgaaaatcaaaattttcttgagaactttttttgaagagttatgattgcattagctgcttcttcgttggggaatacaccgattgcttcgtttaaccgtcattttagattccggttacatccacgaaaccctctgatacaagcagcggtttcaccttcgtcttcttcttcttctcctactgcttcatctggctttgatttgagttctctcgaatccgccattaacaagaaagatagtaatggtgttaaggaagctctcgataaattgagtgaagaaggttgggctaagaaatggagctcccagccgtatctttcgcgccgtacgacatcactgcgggagctgacaactctcggtatcaagaatgcagagactctggccatccctagtgtcagnaacgatgcggcttttcttttcacagtagtcggatcaactgggttcatagctgtacttgc

SEQ ID NO: 65 - DNA, 518 bp, Arabidopsis thaliana
tgatgtatactgtaatgttattctacaagacatttatttttattttttcaatggattttatttaatattatggaacaattaaaaatcaatacagtcaaaaaaaaaattacaaacaagtagttcaagtaacctatttatgcactaaacacacgatattacaatttcagtacttgatatttttatcacaataaatagcattttaaagaaaaatgatttaaaataggtaataacaaatacacattaggtgactaggcttaaataagtcttttatcataacgttattacaataactaataacaatacaagatctgatagtaaaaaactcataaaggaaatatacatgtcccattatttttaaataaataaataccgaaataattattttaaggaataggtcacatatattgagtttacaatttgaaatgtcatctaatgattctaatatgggtacgtatttatgtaatatttggcatctactaattaacgctacttggagaaataattttaaagtgttttgc

SEQ ID NO: 66 - DNA, 518 bp, Arabidopsis thaliana
  misc_feature (1)...(518): n = A,T,C or G
aattgattacgaaggacatggaaaatctgatgggcttagtgcttatgtcccaaactttgaccatctcgttgatgnnntctctactcactacacaagcatttgcgagaaagaagagaataaagggaagatgaggttcttgttaggagaatcaatgggaggagcagtgcttttgttgttacacagaaagaagcctcagttttgggatggggctgtcttggttgctccaatgtgtaagattgctgaagaaatgaaaccaagccctttggtaatttcgatattggccaaacttagtggagtgataccttcgtggaaaatcatccctggccaagatatcattgagactgcttttaagcagccagaaatcaggaaacaggttagggaaaatccctactgctacaagggacgtccacgtttgaagactgcttatgagcttttgagggttagcaccgatctcgagaagaggcttaatgaggtttcattaccgttcatagttttgcacggtgaagacgataaagtca

SEQ ID NO: 67 - DNA, 518 bp, Arabidopsis thaliana
ccacgcgtccgattcaatactctcttctcctgaatctctttacctttttacgttgacattgatcctcgcagcgtctgattttgatcgaagaagaagaagagatcgggattttttcgcggttgtatatcgcctatggacgaggtgatgacagcggcggacgttggttcgttaggtggcggcaatagggcgttgtacggatctcctccgtcgcataatctgtttcctcacaatctcccaatcttctccgcttttcttgccttcgctcttgctcagttcctcaaagtcttcactaattggtacaaagaaaagaggtgggactctaaacgtatgattagttctggtggaatgccttcttctcattctgctactgtcactgccttagctgttgccattggctttgaagaaggagctggagcaccagcttttgctattgcagttgtcttggcttgcgttgttatgtatgatgcctctggtgtcaggcttcatgctggtcgtcaagccgagctgctgaatcaaat

SEQ ID NO: 68 - DNA, 518 bp, Arabidopsis thaliana
  misc_feature (1)...(518): n = A,T,C or G
aattcgaaaggagaagtttcacgtaatgatgaaatgaaacagcagtctacacacttcaaggatatcaggaaccaacttctagaaagactgaatttcggatattctggttctgattcgctggatcagttgcagattataaaaggacagcgaccttgaggaattgcgagaactaggatctggcacatttggcacagtttatcatgggaaatggcgaggcactgatgttgcaatcaaaaggatcaatgatcgatgttttgctggcaaaccatctgagcaagaacgaatgatcgatgacttttggaatgaggcacagaacctagctggcttgcaccatcctaacgtcgttgctttttatggggttgtgctggattcacctggaggttctgtggcaacagttacagagtatatggtcaatggttctttacgaaatgcgttgcagaagaatgttannaattttgataggtgcaagcgtcaactgatcgctatggacattgcttttgggatggagtatttgcatg

SEQ ID NO: 69 - DNA, 518 bp, Arabidopsis thaliana
agacaagaggaaaaacataacaaatgatataatctcaaaatcatgtgtgattattatgaggcgaaaaaaacaagttttcgtgattatcctcataaaactctctagtaataatcgaaggaaaaagaagaacgatgaggtcttttcaccttcaggtgagaactggtctcatcaaagatttttatgacacataaaaatgatgatacgttattacccagagaaaggctcttctctatttaacatcctttgttgaaaatacgactgtgtgtggccaggccaatgcaaaagcttttcagcggcgctttagttaaccacgtcaagaaccagcttgcgggacttgagaaccgaccattttagtcgcctgtagtaagcagcttggagaagagcgagagagagtaggaatatccatttgaaacccatcagtttcctctcttccatttctggttcagctgcccaggccaagaatgatacaatatctttacccatctgtgcctctgtggcggggacaccatcttcatact

SEQ ID NO: 70 - DNA, 518 bp, Arabidopsis thaliana
cgcccgggcaggtacataatcaacgagctaaacataaactccgtgattacgacgccatgtcacgaggagattcttcccatcaacgctttcacaacccaaagaccttatactttaaagggttacgcatattccggaggtggaaaaaaagtgacccgtgtggaggtcacggtagatggtggagagacatggaacgtatgtgcacttgaccatcaagagaagccaaacaagtatgggaagttctggtgttggtgtttttggtcacttgaggttgaggttttggacttgcttagtgccaaagagattgctgttcgtgcatgggacgagactctcaacacgcagcccgagaaaatgatatggaatctcatggggatgatgaataactgctggtttagagtgaagactaacgtgtgcaagccacacaagggagagattgggattgtgttcgagcatccaacgcttcctggtaatgaatctggtggatggatggcgaaggaacgtcacctcgaaaaatcggctga

SEQ ID NO: 71 - DNA, 518 bp, Arabidopsis thaliana
tttttttttttttttttttttatttcaaaataggctttcttatttgattgatacagtacattacataaaaaaaggtccaagtacattatttgactgatataagagagagaccttgaacaacattaccacaccaacgatcgcataacggtgcatagtttcaagggttaaccttgggagcccatccagagatcacatacttttcctcggtcttagttttctcaaaagagtcgagcgagaacagagtcttcatgtagttatggacatggggaaagctctcagggacagaccagcttttgaaatggccaagagcaacttgaaggtggtaaagctttggtgctaagcttagatccaccgcggaaactctttccccggcgataaaaggaccatcgtgactcttgagatggttctccaaggcttctagctcaacaagcaaggcatgttcagatccgtcattggagtctttgctcttcaagaatgtcccaaaagtaccaaaaatgttggatccaacagaggcaaat

SEQ ID NO: 72 - DNA, 518 bp, Arabidopsis thaliana
ttttggtgtaataagagatgataataaattcttcaaacaaaacatatcctcgaattcaaaatcttcaaacgcaactaaaatgtgaaaacaaaaactgagtgttttagtctgaaaataaataagtaaaaagctactagaggcatgagacaaagaaggcttgattggtgatttactcttcatcatcctcatcatcatcatcaccacctgctccgtttaatgccttcactctctcgatcaacttgttcttcctctcttcgtaagtcagtttcttcaagttgtacctcttgtgttccttgggagcagatttctcggttttcttatggttgggttctgctcggatagctgcgtgaaccttcttgtacatctcctcgatgctctcagcttcaactcctttcttaatgtaagcactgaagtgagtttgcaacttctccggctcatcttcccccaacagcttcatgtagtttgagacatggccaccgtagatgtagttcctgtggatttcagcatcaagttgcttg

SEQ ID NO: 73 - DNA, 518 bp, Arabidopsis thaliana
aaacagaggcacagattgggatgaaaaagattcagcagagtaaaacaaaatttaatgtctggaaaaattcaataagaaaatcaccataaaacataatagttcagctctatccagaaacataaactaacatcatcaacagcagcagcttacattccagtgaatgccttctttccaaatgaagaagaagacccagctggtatcaccttcaacacattgaacctcactgtcttcgacaatggcctgcattggccaatgatgatatggtctccttccttaacacggaagcatggtgagacatgagccggaatgtttgaatgcctcttctcatacctctgatacttcttcacaaagtgaaggtaatcccttcgcacgataatggtcctctgcattttcgcactgtggcaagtaccagctaagatacgacctctaattctctttccctttccagatttcttcgagctaaggaagaccttaggctgcttaagaaaagctttctcagtctgttccgccatggctga

SEQ ID NO: 74 - DNA, 518 bp, Arabidopsis thaliana
ttttttttttttggagaatcaaaacaactttactaagaaccaatgagcattatttctttctcgttcgtaaacaagtttgaagttattatttgagttttgtaccaagctcccagacaccttaagaacaaatagaaacagaagcggacaaactccgagaaaaatagcttgaaaacaaacatgcatccatccagacagcataacacatcttctttcattgtttgattagtctgaagatgaggaagaggaagaaggaggagtgtagttgtcctcgagaagatcatcataaggatcccttcgaccagcaacctgactgatctgaggatcccaacgaagctgagcattgtgacgctcaaatgtccagaatccataaggacgaataggcaatgcccacatctccttaatcttcttgcacctctcatgcatctcatatatgtgttccctcgctttcctgtctcgttcctctggattctccattaaccttaacaccaaattctccgcgaattccattatgaaaccat

SEQ ID NO: 75 - DNA, 518 bp, Arabidopsis thaliana
acacctatcaataagagatatattttagagtttcactttggtgcacaaacaaagctcgtacaacattcttcgtatatggctcttcgtcgctgcttacctcaatattcaacaacttcatcttatctctccaagatctggggatttcgtatgcatgggaccaaggcagcagcttctgttgtagaagaacatgtctcgggggcagaacgtgaggatgaagaatatgctgatgtagattgggacaaccttggattcagtcttgtacggacagatttcatgttcgccaccaaaagttgcagagacggaaacttcgaacagggttaccttagccgttacggcaacatcgagctcaaccctgctgctggaattctcaactatggccagggactaatagaggggatgaaagcgtacagaggagaagacggtagggttcttctcttccgtccagagctaaacgcgatgcgtatgaagataggagctgagagaatgtgtatgcattctccttctgttcatcagtttat

SEQ ID NO: 76 - DNA, 518 bp, Arabidopsis thaliana
  misc_feature (1)...(518): n = A,T,C or G
gctacacatgatcacttactagacatctgacatcaattgatatttgtggacacgacttcttctgtacaacataacatatagtacatataaacatatagatactcgtcacccaaggatcgaggcttatcttcttccttcttcttctttttttgctggtctaatgtctctgtcttcttcagctttgtctccaactccaagttatagagagaaacaatatacagagttctttgatcattctgccttctccatcagctttataccatatgcttgcaatatatccaaagctggcaaatacacctctgcttcgagaggccttaagactcctcttgtcttgatcttgtcttcaattaacagcagagctccaatggctgcagggatcccaacagtcttggccatagcggttgttgtttgcccattcttgatgtccccgaattccaaaagagncncagtgtgcttctctatacgtttgctttcaaggaattccacttctacttcgtgatgcaaaagcaccatgtcct

SEQ ID NO: 77 - DNA, 518 bp, Arabidopsis thaliana
tcgagcggccgcccgggcaggtgaaagaatagaataaagtggcaaaaccgaaagtgaaccaacttgtagtaaattaatagttatgggttcgaaacctaatgccatgaagaatgtggtggctatggcgacagtttctgctctgttccttctagggtttcttgtttgctctgtttctggttctgtctcttacgatagcagagccattaccatcaatggcaaaagaagaatccttatctctggatctattcactaccccagaagtactcctgagatgtggccagatctaattcggaaagcaaaggaaggaggcttagatgtgattcagacttatgtgttctggaatgggcatgagccatctcctggaaaatattatttcgagggcaactatgatttggttaagtttgtcaagttggtccaacaatctggactctatcttcatctaaggattggtccttatgtctgtgctgaatggaacttcggaggatttcctgtgtggcttaagtacctcggccgcgacc

SEQ ID NO: 78 - DNA, 518 bp, Arabidopsis thaliana
ttttttttttttttttttttttagaagaaaacggatataattttcacaagaacttttttccgatatgcacactaatttatcatatacatgtttgtaaatttactaaacttgaagagaacttcaattttgctttaccaatattacgagagataaataaaacagacacttacaaaactcacatcttcaaaatatatacagttttattagtgaaggggtctctcttacgccgtggacaaaacctccaactctgcccaccaaagaggtgacaatttcggtgtagcatcgttcggtgacaatcccgtgatctcccgtaaccatcctgtgacttcttgcattgtaggtctctctttcgggtcagtcctaaggcatgatttgatcacttcacctatattctcaatcttggcatcataagattccagtgttggatctaccattttggctagagtctctcctcttaagaaatcaaccagcgagctatctactgagtcaggtttgttaacggattctatgagtttccc

SEQ ID NO: 79 - DNA, 518 bp, Arabidopsis thaliana
ttttttggttcaaatgatcaatatatatatgttttcatgtaatgttacattgggatattgcacatgctccggtaatggaaaacagagataacacagccagctttgttttatatatatagtacacagctcaaacaataataatcttctctagctctgataatttatcaatatttctgctactaattctcttcggttttttatttacaatgccgggccctcatgtgtttcagttgtctttccctccttgtttatctgtcatgtgggaattctaggtcgttttccaacaccttgaagtgttgtggctgctgcccagagcaatggaggttccacattttgaagtatgacctctccagattcttcacccaacgcatggtgtcgaatagaggacaggttaagcggctagccctcaattccttagtcagtgcctgaagttttggcttgttcagtgccaaagagacagccttctcttcgtactcctccaagctgttaacaatcatcccatggcccagaccagttgc

SEQ ID NO: 80 - DNA, 518 bp, Arabidopsis thaliana
accaagtttcgactctagacttccttctctcctgaaacacgagagagctgaaatgaagagaaaatgtaggatttggttgcctaaacagctcgcatcaactgatgatttgagtcacagtctattgtttgggtggttcgtttgccattcctcttcttgtcttgacgttgttgtgtccttcatctctgatgagagctccttgtccaatgccggatctaagctccaagatgtactccgtgaaacaaatgagaagatgccctcaactttacgggacaaggcagcatttacactccttggtcgttatgatataagccgtaatgctaatggaaacgtatcaaagattataagagacaaagatatgtcccgcaaggctggagcttatgttaggccttgcaaatatagtggcctcagttgtggttgtcataaggttgatggcttattagaggatttcaggaaagattctgtgagaaattactggattcatatggtgcatgattctgcagagcatagaattatggaat

SEQ ID NO: 81 - DNA, 518 bp, Arabidopsis thaliana
aataagtctcgcgctgaaatctatctttgtgcaagcaaactctcgaagaaccttagattgaagatggtactgatcgaatcaagtgagagtgaagacgagatcctcatcaaaaacgaaccaaagccagcgtcttcatcctcaccgcaacccacggagacgaaacaagtcgacggagatgattccgatgggttcgaaactgccagcgaacgtgaaattagcgatgaagaaggagaggaagatggtaccaaaaatgacgccgtcacgagtcaggaggaaccacagcactcggagaagaaggaagagcagattgagctaatgagtgaaggagaagccatagtcgacgacggatcaaacaaggagaaagctttggcagaagcaaatgaggctaaagcggaaggaaataaactgttcgttaatggcctttatgaagaagcattgtcaaagtatgcttttgctttagagcttgttcaggagttacctgagtctatagagcttcgatccatatgctatttaaacag

SEQ ID NO: 82 - DNA, 518 bp, Arabidopsis thaliana
cggccgcctcctatctagctcacgctttcttcttcttccaatggcgtcttctgcagctctcggatctctccatcagactttagggtcagccattaattcacagagtgaggttcactcgctttctggaaactggtctgcctctggtaattcatgtgtgccacggtggagattatccaacaggaacagcaactacaggctcgtgttacgtgctaaggccgctaaatcttcgacaacaaccataagtgatggttcatctgatgctagtgtgtcagacgggaagaaaacagttcgacggataactttcccgaaagaagtggaggcactggttcacgagatgtgtgatgaaactgaggttgctgtgctgcaacttaaggttggagatttcgagatgaacctaaaacggaagattggagcagccacaaaccccattcccgtggcggatatatctccaactgtagcgcctcctattccttctgaacctatgaataaatctgcttcttcggctcctagcccatctc

SEQ ID NO: 83 - DNA, 517 bp, Arabidopsis thaliana
tattaagtgcaatgcttcttcgagctattggtcagaaactccagatggcttatggactgaatgcgagactacttggttttcttaagtcatcaagggataaagtgatcctaccttgtggtgatattgctgctcttgtgtatttgtggaatcctttcacgatagtttcttgtgtgggcttatcaacttctcccatcgaaaacctggctgtcatattggcgctttttggagcagttacacgacgagttcctctggcagcatttggcttagtcattgccacacatttatctctttatcctgctactctgacaattccaataatctttctattgggatatggtttggatgctcctcctataaaattgttccttcagaccagaagtgtagaaaatgaggagagttcaacctctactgtttctaaacaagccaagttgaaacagactacgcaccttcctttcttatggaaaacagtcgcacacttcttgttctgggtacttctgtggtcactctatgtgttgat

SEQ ID NO: 84 - DNA, 517 bp, Arabidopsis thaliana
ccacgcgtccgagtgtatccatttttggaggggaaaacaaagtatgcagcagccctgtgtgatagtgggttcgaagtactgctcaccaaaccctgtaggtttggcgatcgtccgtaaggtgatgaagataacggacggtaacttcgtgataacgagtgcggacggtaagttattgttcaaggtgaaggatcctttgtttagtcttcacggcaagaggatcttgctggattgttctggagctaaggtcttaactttgagagggaagatgatgaccatgcatgacaggtggcaagtgtttagaggagggagtacggaggagggtgctctactatacacggtgaaaagatcgtcgatgattcagctagcccctaaacttgaggtgtttttggctaacaacgtagaggagaagatatgtgatttcaaagtcaaaggggcctggctcgacgactcttgtgttgtctacgccggcgattctgacaccattattgcccacatgtgcggaaagcaaacgatgcga

SEQ ID NO: 85 - DNA, 517 bp, Arabidopsis thaliana
  misc_feature (1)...(517): n = A,T,C or G
gcggccgccttgttttcgccggcgatcatggagaaaagcggcttctctcccgtcggtctaagggttcttgtcgtagacgatgatccaacttggctcaagattctcgagaaaatgctcaagaagtgttcttacgaagtaacgacctgtggattagctagagaggctttgaggttgctgagggagcgtaaagatggatatgatatcgtgatcagcgatgtgaacatgcctgacatggatggtttcaagcttcttgagcatgttggtcttgaattagacctccctgtaataatgatgtcggtggacggcgaaacaagccgagtgatgaagggagtgcaacacggagcttgtgattacctcttgaagccgataagaatgaaggagttaaagattatatggcaacatgttctgagaaagaagcttcaagaagtgagagatatcgaaggctgtggatacnnnnnaggagcggattggatcactcgatacgatgaagcacattttcttggaggtggtgaagatg

SEQ ID NO: 86 - DNA, 517 bp, Arabidopsis thaliana
gaacataataagcatacaacaaaggacctgtctggtcttaaggggaaacacaaagtacaaatgaagatggatcatttcccatcatcacacagattactaatgttacagacagaagaagaaaaataaataaaaccagcaaaaatcattcataatctacatcaaaccagaaatagaggtaagccttggaatacatgactcgaacacgctgcagaaccaagtctccccttgttgaaacagcctttgcacctccctcgattcttgtctgcaaaacggttacactgtttgctttaatctttccagtaacagtttctttcacttccacatggcttaagatattttcaatgtcttcatctccagcagtgctcacgattgggcatgagagatgatccaaagggtttgtctcacattgaagcacacatccatcaatcgttagccttccactcctatgaagcaaacagcacccgagctctgcttttactgttaaattcgcaagcttgcaggtcgataacagttccag

SEQ ID NO: 87 - DNA, 517 bp, Arabidopsis thaliana
  misc_feature (1)...(517): n = A,T,C or G
ttttttttttttaaatcaacagagacacaagcaaagaagcaacgattgtaaacattaaaattccaatatgattcactccgttactcatcactacttggttttctgtatgtacaacagagataataatcatagctatggactatggttcaagcttcatctgaagcgttggctcagaacagttgttgttgttgttgttgctctgttgctggaggatatctccaaaacccatctgaacaatgctttgcaggtcattattttcccagaatcctggtgtctcagtgtgaacaaatccatcgtttgnnnggaattgtgtgtctgngaatcttggcatgttcttgccaagtgaatagtatgctgatggaagtctttgctctgagcaagccattgcgtaaagagactgcgttaacgactcccccggttgaatcatctctgtggataaagaagcattagcattaaactccatccttggatttacggtagccagcttcatggacaagaactcaacttgtctctgcaa

SEQ ID NO: 88 - DNA, 517 bp, Arabidopsis thaliana
ctttggatccgctggaatctctgaatccgttaaattcacaccgatttcttccttcccaagcgcattcaattatggcatcgatatcataggtatcagtgtaggcgacaaggaattagcgattactccaaactcattctcgaccgaaggtgctataatcgactcaggcacagtgtttactcgcctccctaccaaagtctacgcggaactccgcagtgtttttaaggaaaagatgtcgagttacaagagtacgtcgggatacgggctttttgacacatgttacgatttcactggcttggatacggtgacatacccgacgattgcattctccttcgccggtagcactgtcgtagaacttgatggatcagggatttcgttgccgatcaagatatcacaggtttgtttggcgtttgcagggaatgatgaccttcccgccatctttggaaacgttcagcagacgacgctagatgttgtgtacgacgtggctggtggacgagtcggttttgctcccaatggttgt

SEQ ID NO: 89 - DNA, 517 bp, Arabidopsis thaliana
gcccgggcaggtactctgcacctccttatagtagcggaggatcatccatacctccttcgtatgagaaaccgtcagtgaaatttgatcaatctggttatgacggttataaccggagcagatcggatttaggatctgatctatacggaaaacgatctgatagcggagaatatcctgcttttgaagattcctatggcgatggcgtttatgcttatcaaggaggcaaagttgagccatacggttctcgtggaactgcgccgaaatcatcgaattcgacattgttcgatgattatggacgatccattagcttttcttcttcagggagagattcttctgttagctcgaattctgctaagatcgtgagagctgttcctaaggctgatgtgcaggaagattccactggtggtgtgcagaaatttcgtgtcaaattgttggctgagacttatggacaaaccacaacagatgttctttgtcagattggtttggatggtcttcgtatgcttgatccaagtactagccg

SEQ ID NO: 90 - DNA, 517 bp, Arabidopsis thaliana
ccacgcgtccgccaaaaacccctaaaagccttatcccttcttcttcccatggctgcttcagcttcgtctctcgctctctcttccttcaaccctaaatctcttcctttcggcgtctccagacctgcctccgtttccctcttatctccttccctctcctttaaactcaattccgactccgtttccttctccatcgccgccaaatggaactctcccgcttctcgcttcgcccgtaacgttgcgattacctcagagttcgaggtggaagaagatggtttcgctgacgtcgctccgccaaaagagcaatctttctctgctgaccttaaactcttcgttggtaaccttcctttcaacgttgacagtgctcagctcgctcagctctttgagagtgccggaaatgttgagatggttgaggtaatctatgacaaaattacaggaagaagcagaggttttggattcgtgactatgtcttcagtttctgaagttgaggcagctgctcagcagttcaatggctatgagt

SEQ ID NO: 91 - DNA, 517 bp, Arabidopsis thaliana
tcgagcggccgcccgggcaggtgcggagattgagagattagcgacgatggaggaaagcaaacagaactatgacctgacgccactaatagcgcctaacctggacaggcacttggtgtttcctatattcgagttccttcaagagcgtcagctttaccctgatgagcagatcctgaagtctaaaatccagcttttgaaccagacgaacatggttgattacgccatggatattcacaagagtctctaccacactgaagacgctcctcaagaaatggtggagagaagaacagaggttgtcgctaggctcaaatctttggaggaggctgctgcaccactcgtgtcttttcttttgaaccctaacgctgtgcaggagctaagagctgacaagcagtacaatctccaaatgctcaaggaacgctaccagattggtccagaccagattgaggctttgtaccagtacgccaagtttcagtttgaatgtggcaactattctggtgctgctgattatctttaccagtac

SEQ ID NO: 92 - DNA, 517 bp, Arabidopsis thaliana
ttttttctaataaacccaaacctttgaaaactttaggcttagatactgacagagatacacaacaaagaacaagactttcgaatccaaatacataatgaaaaagcataaaaatggatgtgttcaatgatgaaatttcttattgttttcgggtatgaaaatgcccatcacatttacactgtcacacctcagatctcaatcacaaagatccatctaatcacaaaaacccaaccaaaggataaacagatatataagtcacaaaaagataaacagatatgttgatcaagttcatctctcaactctgtttttctggagccttagaggaaacagaggaggcaatcgagaagaggacttagacggagtacaaacaggaacatgaatcattggtcttatcctcatagtcacagatctcgttctctctaaccctttcttacctctcttcccttccttctctctctcctccttcttcaccgcatcgccaatcgaactcgaagaagacgatgtcgagcttgaagaagaa

SEQ ID NO: 93 - DNA, 517 bp, Arabidopsis thaliana
gcatctgttaagtctttcgaatgcatcgagacgtaaaaaaaaaaaaagtaaaggaagaagaaaaatttaggcatataacttggtgagatcttcagagaattccctcctaattacatctcttttcagctttagagctgctgtgactaatcctgactctggcgtccatggagatgccaataatttgatctttgctggtatctcaaacttctccaatcgtgattgtttagccgccttcacaagggacgcatacacttctttcacggcttgctctttcgtgcacagttcttcgaagttggcaaagtctattccttgctttgaagcccaaccttcaactgtatgttgggacgcgaccacaagagccacacagtaactgtagaacgaatcagcatgaaccattatgttttcaacatagggacttatacttagagcagcttcaactttgcccaaggagacatattctccatgctgaagtttaacgatatccttttttcggtctattatctcgaggcagccatca

SEQ ID NO: 94 - DNA, 517 bp, Arabidopsis thaliana
ccacgcgtccgggtgagcggattctcggtcttggagatcttggttgccagggaatgggaatccctgttgggaagctttctctttacacagctttgggaggaatccgtccatcggcttgccttccaataaccattgatgtgggtacaaacaatgagaagctgttgaatgatgagttttacattggccttaaacagaagagggcaaatggcgaggaatatgcagagtttttgcaggagtttatgtgtgctgttaaacaaaactatggagagaaagtgttggtgcagtttgaagattttgcaaaccaccatgcgtttgagcttctctctaagtactgctcaagtcatctcgttttcaatgatgatatccaaggaactgcatctgtggtgcttgccgggcttattgcggctcagaaagtacttggtaaaagcctagctgaccatacctttttgttcttgggtgctggagaggctggaaccggaatcgctgagctaattgctcttaaaatttcgaaagagac

SEQ ID NO: 95 - DNA, 517 bp, Arabidopsis thaliana
ccacgcgtccggttaaaagagtgagagagaaagaaagagagaagatgaaggtacaggagggtttgttcgtggtggctgttttctaccttgcttatacgcagctagtcaaggggcaacctcgcaaggagtgccaaactagatgtggcaatgtcgcagttgagtacccttttggtacttctccaggttgttactatcccggagatgaaagtttcaatcttacttgcaacgagcaagagaagctcttctttggcaacatgccagtcatcaacatgtctctcagcggccagcttcgtgttcggctagttagatccagagtttgctacgatagtcaaggaaaacagactgactacattgcccggcggaccaccctgggtaatttcactctctctgaacttaacagatttactgtagtaggttgtaacagttacgcatttctccgcacatctggagttgaaaaatactcaactggatgcatatcaatatgtgattctgccacaacgaaaaacggatcatgttc

SEQ ID NO: 96 - DNA, 517 bp, Arabidopsis thaliana
ccacgcgtccgtcagtgacacatcgagtcgaagaagaacatacatttctactgaatcagatctgatctgctttgtcagtttttaaactgttctgatctaattgagatttctcaattccactcaaaatcctttaaagcttgtctctttttggtatctctgaatcaatttggggaaatcaagaggagaagtgacaatggatgcgtttagaagacaagcgagtaagcttagagaccaagtcgcaaagcagcaactggctgtgataaagcaattcagtgggactggttatgaaagctcagatgtaatggtgattgatgagcttgaaatgcaaaggcatcatcaactcgataaactttaccgctctactcgttctgcaaaggagttccagagagatattgttaaagcagctgaggcatttaccacgatcgggctcagacacattgaagcaggaaccaagttgtctgaagactgttgtaggtatgggaacgaaaatagtcagaacattgatgagaatatactg

SEQ ID NO: 97 - DNA, 517 bp, Arabidopsis thaliana
cggcgatgaaaggcgtctcttcgacgcccggagattacgtctactttaaatctcaggttcctcttcacaagattcccattgggacaaagcaatggcgttactatgactttggtccaaagactgttcctccgctcatatgtattcctggaattgcaggaactgcagatgtttactataaacagattatggcactctctatgaagggttatcgggtaatctcagttgatattccacgggtttggaattatcatgagtggattcaagcatttgagaagttcttggacaccattgatgttcatcacgtgcatctctacggtacttcccttggaggcttcttagcacaactctttgctcatcaccgtccaaggcgggttaaatcattagttctatcaaatacatatttggatactcgtacttttgctactgcaatgccatgggctccttttgtcagttggaccccttcttttttgcttaaacgatacgtcttaacaggaattcgtgacggacctcatgaacc

SEQ ID NO: 98 - DNA, 517 bp, Arabidopsis thaliana
actgtcttcgagatcaaaagctcagagattccggcttttattggaagggagcttgagttccggtttctcgctgttgttcctgaaacattggaaggcaaaccttacaccaattctgcggtactttgtggtcgatacagtgatgaggagtttttccagattagatgcaaaggaaacaaagagatttactttcaacattatggaagattcaagatcgataagatatggcgggacgacatcttaccttgtcgtctctatctaagacactgtgtgttggctgctaagaatctgggagatgaagcttataataactttctggatcatacattcttgggagatcgaaaaacaaccatcagagagtatttaagcagcacagggtctggtatcatggaagaagaaccaccggaggctctaaagtctagatatggaggttgatcaaaaaccaacaaaaaaagttaaactgatttttatcaagcttcaaacgttatcgaagctagttataaaattaagaaaacaaaaa

SEQ ID NO: 99 - DNA, 517 bp, Arabidopsis thaliana
  misc_feature (1)...(517): n = A,T,C or G
ccgtattgaccgtcggctgtatattgggttgcctgatgcaaagcaaagggtgcaaatatttggagttcacagtgctgggaagaaccttgcagaagatatagactttgggaagcttgtttttcgaacggttggcttttccggggcagatatccggaatcttgttaacgaagcggctataatgtcggtaaggaagggacgttcttacatatatcaannnnacattgttgatgtgttagataaacaattgctcgagggtatgggtgtacttcttacagaggaagagcaacagaaatgtgaacaaagtgtatcttacgaaaagaagagacttctggctgttcatgaggctggtcatatagtgttggctcatttgtttcctcgatttgactggcatgcattttcgcagctccttcctggtggcaaggaaactgctgtatcggttttctatccacgtgaagacatggtagnccaagggtataccacgtttggttatatgaaaatgcaaatggtggtagctcat

SEQ ID NO: 100 - DNA, 516 bp, Arabidopsis thaliana
  misc_feature (1)...(516): n = A,T,C or G
caaacgaactctcttttgtcccctaagaattttttctttttattctaaagaaaaataacaaagcattaaacaaataaaatgaaatagattagcatcgacctctcggaatctttctgactttgcttcttgtggaacggttaatgaaagttcaaaacttttgattcaagccacggtctgttctgtctccatgtatgattgctccatccaaaccggagctagtcttgtctcctgtggctctttcaccagcggctccacccatgagacatctggctcttcgagcccagtcccttcgttaggcagtcttgattccatgccaccggctctgagacggaaagaagtggatttnctgagcttctgtagctcgtctccttggacgctccagtcaagcttcccatccaatgagccccaatcgtttaaacaagttgtagtcatggaagagattgcgggatggtgattcagtccgttgttgcgttctatgaagctttggcttcgctgtttagcaaattcagccgctct

SEQ ID NO: 101 - DNA, 516 bp, Arabidopsis thaliana
  misc_feature (1)...(516): n = A,T,C or G
caagactgcgggtctccagaagtttggcgtgaggcccgccagggcctccgtcaagatggaggttgtcgccgagaagaagctcagggtggccatcaacggcttcggccgcattggtcgcaacttcctgcgctgctgggagggcaggtccaacaccctgcttgacgttgttgctatcaacgactctggaggtgtcaagcaggcatctcacctgctgaagtacgactccatcctgggaaccttcaacgctgacgtgaaggtggtcgatgactccaccatctccgtcaacggcaagcagatcaaggttgtctccagccgtgaccccctggccctgccttgggctgacctgaacatcgacctggtcatcgagggcaccggtgtcttcattgatgtcaagggtgccagcaagcacattcaggccggtgccaannnnnntctgatcaccgcccccgccaaggacaaggaaatccccaccttcgtgtgtggcgtcaacgcccacgagtacaagcacgagtaccc

SEQ ID NO: 102 - DNA, 516 bp, Arabidopsis thaliana
ccacgcgtccgatcaaatcaaatcgaagaaggagagaagaacagagaaaaagagttgaatcaaatatggctgggagagctacgatccctgctcgcaactctgccctcatcgcaatgatcgccgatgaggacactgttgttggatttttgatggctggagttggtaatgttgacataaggaggaagacaaattacctcatcgtggattcaaagacaactgtgagacaaattgaggatgctttcaaggaattctcagcaagggatgatatcgctatcattcttttaagccaatatatcgccaatatgatccggttcttggtggatagctacaacaagccagttcctgcaatcttggagatcccttccaaggaccatccctatgatcctgctcatgattcagttctctctcgtgtcaagtacctcttttctgcagaatctgtgtcacagcgttaaacatatgcattttgcaagctctcggagcctatatcatttgtttgtttttgatattcttgtcttt

SEQ ID NO: 103 - DNA, 516 bp, Arabidopsis thaliana
cgcggccgaggtacattccctgcctcttgaccagcgatgtaaccgtttaagattatcggtaaccctcttatcatagcttcagctatagtgcctggaccagcctttgttatgatgcagtcacaggcacccatacattcctccattttcgttataaaccccttaacctggacagggattttccagtctaaggaacttaatttgctttggagtttcttgttccgtccacagattataagaacctgacctactgcttcaccaagattctcatcatacaaagcatctgcaagtgctcttgctgttgcctcgatgggacccatcccttctcctccacccattaacaaaacagctggaagattctcatccatccctagctcccttcttaattcaacctttgggcgaactggtttcacaaaggaaggtcgaacagggaggccataaactttgatttgtgatgtttcaagtcctgctttttgagccctttttgccacttctgttgatgggcaataacatcttgtc

SEQ ID NO: 104 - DNA, 516 bp, Arabidopsis thaliana
ttggtgttgtcgtgttgtcgtttcagacataaacccatgaagcttggataaattagaagaaagtagatcaactctatttcaagaaaataagaggaattgaagtaacattagaagttgaagtctttttgttcactaagcattctcataaaatttgtttgacaaaaacataaaataatgtttagtgtcaagaagatgatgccaccaacttaacctgatctgctcgggtacaacaaacatatcccacagttcgatccatctccgcaagaacaacttcccagcatagaaccaatcacggggttacggatcagcatagattgttcactatctttgagacagtagcaaagatgctaagatttcggaacggtgacattaagtatcttcacatcttggtaaggcctgtcgttcttgtctgtcttcactttctctataccctgaacgacgtccattcccttcacaactcttccaaaaacagtgtgcttattgtctagccacggtgtagccactgttgtgatgaag

SEQ ID NO: 105 - DNA, 516 bp, Arabidopsis thaliana
ttattgaaacgaaaattaagaacattgattaaaacccaaacacaagagattcggataacttaaaaacacgaggaaagaatcagtatcactttccccagtaatccaaaagtagagaattcgagttttaaaacttaaaaaaaaaaaaggataaagaagttatcactaattgtagagatcatcatcgtccccagcagcggctgcagacgtggcaaacggatctgcgactccagtggtggcacctgaaccagcagaattctcgaacctgaactcagaaccgaaccctctagactgctgcaacgtctgagcaaaggcttggtacttcctgatgtctgcatcactcacactcctacgcgcatacttcatcgactcctcaaagtgtgcagctttgatctctgatacttcatccactccatcttcctccattgcctctgggttctcgctcctcctcttctccttttcaatgtccttctcaatgttttctctgatggcgtacttgcaagctctccggacgcgtgg

SEQ ID NO: 106 - DNA, 516 bp, Arabidopsis thaliana
caaggaagagcctgaccagcagtgtcagcagaggttcactcaaaaccaagaatccgtttagccgtgtgaaggacgaaggtgagaacagaaacaagacgggattgtcgatgaggaagtcgtggtccacggactcccttggtctgctcagccagagcaaccggttggggaagacggtctgtatctgtgctcctacaaagcatgaaggctcattccgttgcaggcttcaccgttcatcagccacaagccatggtgcagcaactgcagaacttcatctcccaaagcccttgctttcttctcgtcgtctcggtgaccaataatgtcacatagtctctctttcgttattcacaaaaccagtatggtgccgtcctgattgtctagaagattgttttttcctatccatgtgatgaatccatttggtatccatgtgttcatataaaacatgtgcttatgtgtatgttgatgcacttttaaatctttttttttttggtggtggaaatttcacatatatgtttcttg

SEQ ID NO: 107 - DNA, 516 bp, Arabidopsis thaliana
cggccgcaatacatcaaaaggagatgagagactccaggaatagctacaaaaaatataacaatcaacattcgaaaatgtctaacaatataataacaagaagagacacattctcttgagacacgccttcgctgagtagagaagaccaaaacgaaacaacaaagctccgattccgaagatggaccaacaaaaaaagaacaaagattagggttttttatgaatattttattaatgaaattaacgctgctctaagtcttcttcaaaatctgggaactgtgtagtagtagttaaagatatcccacatttggttgttcttcgttttcttcttaccatccttccctagaggaagacctgttgctgaagaatccgcgctctttggttccttgaaagtttcttcgctgctcattggctggtctaacccaggcatcgacggcaccacgtgatctgggtctctctgtagattcaaaactcctggtttcatcaattgagccagcccgggaatgtgttctttctgaatat

SEQ ID NO: 108 - DNA, 516 bp, Arabidopsis thaliana
ttctaaaatgataatacagagttgttaatttagaaagaaaaacttgaaaaagacgggattttgtacattaataatacactgtcacattaagaccagtagattgactcataagacgtcgttcgcttcacaactctcagatcgaaatatctaaaaactttatagataaatctcaaccgtccaaagtgccatgccattaagttcctctatcacttcagatatttgcttttttttcctctgtatcagaaactacgtcgttttcaacaatcgtaagtgacttctgatacgtattgcataaactcagcatcgttctcaatcccagtcatagtctccggcgccagaactacttccagatccacgcttccgtttccttctctaccgggaaacgccgagatcttcccgtcgaatttattcgctccgccgcttctcacagctaacggttttccccatccgaaatcattgtcgtacattgggaatctcggcgagctccccatcgtgatcgaagctccatctggattt

SEQ ID NO: 109 - DNA, 516 bp, Arabidopsis thaliana
ccacgcgtccgcctcgtttcctttcctcctctcttcctaccattagtacgttactggagctgatctcacgtatattttggatcgtaatcatggacggcgaagattttgccggaaaggcggctgctgaagccaagggattgaacccgggattaatcgtgctgcttgttgttggaggtccgcttcttgtgttcctaatcgccaactacgtgctttacgtttatgctcagaagaacctacctccaaggaagaagaagcccgtttccaaaaagaagctcaagcgggagaagctaaagcaaggagtccctgtccctggagaataaaagccagcttaagcttccttcacttgtgcctccttcaaagcggtttttgttcggttaccaaatttcacccttgcgggttttttcttcctttacttctgtcatgaggattatcttgagtcctgtatgatttcacatggagagtgtagactattgttttggtctgacttgtttttccttcataaaaaaaaaaaaaaaa

SEQ ID NO: 110 - DNA, 516 bp, Arabidopsis thaliana
ccacgcgtccgtgaagttcaacgttgcgaatccaactactggatgccagaagaagctcgagatcgacgatgaccagaaactacgtgcgttttacgacaagagaatctctcaagaagtcagtggagatgctttgggcgaggagttcaaaggatacgttttcaagatcaagggtggttgcgataagcaaggtttcccaatgaagcagggagttttgactccaggccgtgttcgccttttgcttcaccgaggaactccttgcttcagaggacatggaaggagaactggtgagaggagaagaaagtctgttcgtggttgcattgtgagccctgatctctctgttctgaaccttgtcattgtgaagaagggtgagaacgatcttcctgggcttaccgatactgagaagccaagaatgagaggaccaaagagagcctccaagatccgtaaactgtttaacctcaagaaggaagatgatgtcaggacctatgtcaacacttaccgccgcaagttcacaaacaa

SEQ ID NO: 111 - DNA, 516 bp, Arabidopsis thaliana
caatttcattcccctataattttgtgttcaggtcaggtatgcttagctctgtcctctaacaagttattagtctggaaaaactatgtggcggaacttagagttctgggcacaacaactagacaaagataaaaaatctccaagacaaatcagatacataagaaaagaaaacaattgaatcgattggttgcctcgtggtgaagcttgctagatttgcactgagcttggaacgtaagagcacacaagtgaggcacaacttgaaactgtagattctccaagatccactttttcgaagtaccccttcttcccaatgatgtaagctatgttgcgagtaaatttataactgaacctgtctttatccagaaccatggcgacctttttcttctcgtcaacaaagaaacttgcagcgttaatgtcaaactgaaaaccagtgagtgatttcatatcaaccgctaagaaaaccttcctccacgacactgcattgggctcaatcttgcgactaatccatatcttcacggt

SEQ ID NO: 112 - DNA, 516 bp, Arabidopsis thaliana
tcgagcggccgcccgggcaggtaccaccaaaccgatactcgcctctcaagaaagcatggttggatatctacacacccatttacgatcagatgaaggttgacataaggatgaatctcaaagcccgcaaagtcgagcttaaaacccgagctgacactcccgacatcagtaatcttcagaagtctgcggattttgtacctcggccgcgaccggcgcgagcggccgcccgggcaggtaccgggttatccacgctgcccgggcaaatgctactcataaccatggactagatcctgaccgtctccttgttgcggaagcatttgttgggaagggactgtttgggaagaaggtagcttaccatgcaaaaggaagaagcgggattatatcaataccccggtgtcgcctaacagtcatagttagagagacgactccagaggaagaagctgagattgcaaggctcaaagttcacaattttaagaagaaaagcaaacgggagagacagcttgtacctcggccgcgacc

SEQ ID NO: 113 - DNA, 516 bp, Arabidopsis thaliana
  misc_feature (1)...(516): n = A,T,C or G
tttttttttttttttgccaaaatatgagactataagatgaaacattcattcatgatatgttttagatacagacaaagaagaagagtgcaaannnnncatcatacaacattccttctcaaagagagaaaaaacaaaaagataaaagaatgatcaggaagaagataggtttggtatggaaagtccagaatctggactgtgttgctctttccagattttaccagtgactctaagtttaagctctttcctgtctccaccggagaaaaagagagccatgtttctttggatgatgagaccgtcgttgctgtctcttactttcctgtggctatctctgatgcttcttggggttccttcccatgttagcttcctcccactgcctcccacttctaagctgtagctgtagctccgtgcatcttcctcgtcccccatgaatctcaggaatgccatgtatactggacccatcccaagctggaacgcttcgaaatggaggcagaagtactgcccaaagcaatggaatac

SEQ ID NO: 114 - DNA, 516 bp, Arabidopsis thaliana
  misc_feature (1)...(516): n = A,T,C or G
cctttttttttttttttgatgataaatgataatattattaaattttgctaagagtttgtcttattacaagaaaataacttaaaactttaaaactgaacttaaagacaaataagaactaggatcgtaatcaatcgtacggtgaagatcaaagacagaggatgttgtcaagtctctctcaatcaaccgaaataagaccaattctcatctttgcccttgccgccgccaccagctgcagcttcatcgcagtagtaaacgccaaggttattgaccgctgcggtgagagcgtttgttgacgtttccatggaaagataaggcatgttgttgaatgacttagcaagacacgatgcgactactagtttgtcgttcncnttatcaccacaagctttgttgttgttgttcctcggctcctcggctcggtgtttaagagtctgnaacatgagctcaggctcatgctgcattgctctgaggacatctgcagaggattggcccatcacagcacgggtcactgcgaatccg

SEQ ID NO: 115 - DNA, 516 bp, Arabidopsis thaliana
ggattttcccccgtgaagcagcactgccggatcccgaattcgggcgtcgcgacgaaaattggattctgttctggtggtggtggtgttttagattccggtagaaggattggttcctgtgtggtgaggtgtagcttagaaacagtgaatgtcactgttggccaggtgacggaggttgataaggacacgttctggccaattgttaaagccgccggtgataagattgttgtcctcgacatgtacactcagtggtgtggtccttgcaaagtgattgctcccaaatacaaagagctatcggagaagtaccaggacatggtgtttcttaagcttgattgtaaccaagacaacaagccattggcgaaagagctaggaattagagtggttccaacttttaaaatcttgaaagacaacaaggtagtaaaggaagtgaccggggcaaaatatgaagacttacttgcagccattgaagcagcaaggtcaggctgagtctctctctatatcactcattatgtaagtatt

SEQ ID NO: 116 - DNA, 516 bp, Arabidopsis thaliana
  misc_feature (1)...(516): n = A,T,C or G
tatttactgcatttttcagctgttctctgttttcagattcagggcagtctctgtttcttggtattttgcattaaaaaacataccaggaatctggatagacgtgaaccgaggcaaaatcaatgccaagaacctgattatttctgatgaagtcagttccgacttgtgcagcgtaggggttggggttgaatctggttctcgcaggggcagagggaccatagaagccttcaagtccgatctccaccaagtgtttagcgtctaagctcttcacaaacaccgccatttcttgtatccaagactggagtttgtcgccggaaggatcagaggggcaacgaggctcattcataagttcccaggcgaagattgtggggtcgttcttgtaagttatgtttgtgaaggtgttcactctattcagcactgtctgcaatgcaacacgttgannntacaatttgtcnctgatgggtaaataagcaatgagttttcgctgagatggatggaataatcacccggacatgggat

SEQ ID NO: 117 - DNA, 515 bp, Arabidopsis thaliana
tttactttctgaaaagtatattcacactgtaggttgaaaacaaatggttgaatattatctttgtgtgacaacacaacttactatctatacttctcacactctataaactttgtattcattttcatgtttctctttacatctttctgttttccccccaaatttctccttcttgttccaaaaatctccacttctaggagatgctccacacacacacaactaaggtctcataacttcatatttccctgggtgttgagaaggagaaggccaaaactaggggtagacactgttttatacatggtcattgggccttgtttatagtatgtggctttcagtctctcaatctttgctccatttctacaccagtcttgatctcaatggtgaattcggtgtttgagtcctgaaactagatggttccatcattgcgtctttcttcatcctgaaagggcttgcagcaaactctgctaggttgtacccactgtcttgcccaggaaatgcgtaagacggcggacgcgtgg

SEQ ID NO: 118 - DNA, 515 bp, Arabidopsis thaliana
tagatgttccgccaaagggtgggtttagcttcgatctgtgtaagagaaatgatatgcttacacaaaagggtcttaaagctccgtcttttttgaagactggaacaaccattgttggtttgattttcaaggatggtgtgatactaggggcagatacccgagcaactgaggggccaattgttgctgataagaactgtgagaagattcactatatggcaccaaacatatattgctgtggtgcaggaactgcggctgatactgaagcagtcactgatatggtcagctcacagctgcgattgcatcgttaccagactggtcgagactctcgggtcattactgctttgacccttctcaaaaaacatcttttcagctaccaaggtcatgtctctgctgctcttgtactcggtggagttgatatcactggtccacatctgcatactatatacccacacggttcaactgacactcttccattcgccacaatgggttcgggttctcttgctgctatgtctgtgttt

SEQ ID NO: 119 - DNA, 515 bp, Arabidopsis thaliana
  misc_feature (1)...(515): n = A,T,C or G
cccttcccttagtttatacattactctcagctctctttatttcactcagcttcacgttgaagacgagtttctctatttgccagatctgttatctttcacatttctgatctgtttgaagaaagctatgacttgtgtttgataaagagagaagcaaaaaaaggaacagtttttatataaagatatttgctttatttgtttgttcttaattgttgccacgaaaatggcaatgccaccacctggaaatgttactactccgtctgagaaattgcagtttcctcctccggcaaattggatcccagacgagcgagatgggtttatctcctggcttcgtgcggagttcgctgcggctaacgcgatcatcgattcgctttgtcagcatctacaagcggttggggatcacaacgagtacgaatccgtgatcggaagcattcatcatcgtcgcttagcctnntctcaagtgcttactatgcagcagtttttcccagttgcagatgtttcttacaatcttcagcaga

SEQ ID NO: 120 - DNA, 515 bp, Arabidopsis thaliana
aagaaacaaagactctaatctcttcacttccttcagacaaagatttcactgggaaaactatttgcaagtatcaaggatgttggtatactcacaatgttcttcaagctgtcctcaatttccagaaaagcttcaagcctcaagacaccgatatcatcgttgcttcgttccctaaatgcggcaccacttggctcaaggcgcttacattcgcactccttcatagatcaaaacagccttctcatgatgatgatcatcctcttctttctaataatccacacgttcttgtaccctactttgagatagatctctatctacgtagcgaaaatcctgaccttaccaagttctcatcatctccgaggctgttttcgacacacgtgccgtcacatacgttgcaagaaggtctcaaaggttctacttgtaaaattgtgtatatatctagaaacgtaaaagacacattggtttcatattggcatttctttactaagaaacaaaccgatgaaaaaataataagcagtttc

SEQ ID NO: 121 - DNA, 515 bp, Arabidopsis thaliana
cggccgccaaaaacaaagcttcttcttcaactatttacagttttgttacattagtaaaaagatcgaaaattaactctctgttacaaacctctgaaacaaactttcgattcagggttacagagaaaccggtaaaaaaaaagattttttacattttccttttttcaactttgacaaaatttaccatccatttgattctgaacggctctcacagcagccactcttgcagccgtagcagccttattagctgcagccacagctcggctcacctgctcatctactcgtctccgattcactgccttattcgctgtttctcgagccgcctgaacagctcttgaaactggctcactcgtaagaggaagtgaagtcacaagaacccctgaatcccattcaccagatttagcatcaccatttctaaacgagtaagcaccaaacccttgcttacgaccttcatgccatgctccttcataacagtgtccattagcaaatcgatacacaccaaacccatgaatcttgtc

SEQ ID NO: 122 - DNA, 515 bp, Arabidopsis thaliana
  misc_feature (1)...(515): n = A,T,C or G
tcttttctctctctaaatttctcagagtatctaatctctctctcttctctcgttccatattatcatgcgtttcataattcagtaaattttttgaaatctgatctgttctttctgaagcttttgagagaataataaaaaatggaatctggtttctccggcggtggtggtgggtcggatttttacggcggtggtggtggtagatctatacctggaggtccaggaactgttatcaacgtcggtaacaataatcctcagacgacgtatagaaaccagattcctggaatcttctttgatcagatcggaaacagagtcgccggcggtaatggattctccgggaaaaggactttagcagattttcaagcggctcagcaacatcaacaacaacaacaacancaaccgttttatagtcaagcagctctcaacgcttttctttcaaggtctgtgaagcctcgaaattatcnnnattttcaatctccgtcgccgatgattgatctcacgtcggtgaatgatatgag

SEQ ID NO: 123 - DNA, 515 bp, Arabidopsis thaliana
  misc_feature (1)...(515): n = A,T,C or G
ttttgcactccaattcaatcgaatgtgtataacatatagtttatatacacacaacataataatcccaggcaaaatggtaaaactaattaatataacttgtctcaaaaagaaccggccaaaaaaaactaatgccttacagtagttttacatggacacagagatgctccagcttctactctctctttttgacagttcatgttcccggcacagcttttgtgaacaagaagaagccgattctgagcccaacctcttatagtcaacgatcgtttgaggccataccagccaataaatagtcaacgttcagtcttaagtgtgtgtattncacttgtgaggtcgcagttcaagcttataagctcgtatttccatgggagagatcgagacacgtccttcccgtggctgtgaactatctcgaggtagctcttggtcatcgtacccaagaatctccatatcttcttgcaagagattcagtgaagttggttttacctttgaagctgcaagatctttgaacatgtcgg

SEQ ID NO: 124 - DNA, 515 bp, Arabidopsis thaliana
ctttttttttttttttttctttaagaaaaatatttataaaagaaatcaaattacacggcgatcttagctagtgtcttcaacattacacagtatacgaaacaatacactatatatattagttattaattaatggttacaaggacataacaacatcaaacccaacatacatactgcataaagatggtaatgttaaaaaaaataaaatatgctatttgtcaatatgatcggcatacaattaaaaagattcaaatatttatgtatttgtgtgatagacctaatattaagagaccgttaatttggccatgcaaacggctgattcgatgacggtgctggctggtagtaaaacggagctgccggatgctgccacttcttaaaaaccggcggcttctccgcctctttaccccaccgttgctcctccctcttcattaccgccggtggtttttgtggtggcgactccgtaggtgatagaagaggaatagccactttccaattcgcttcgcaagggtttatcttaa

SEQ ID NO: 125 - DNA, 515 bp, Arabidopsis thaliana
ccacgcgtccgtcttcttcttcttcttcgttcttctcgtagcttgaaataagattcatcagaagagtaaataaacatcaaaatccaacaaaccaaactagaaaaatgtcagtagttttactctcttctacttctgcaacaatcaccaaatcccaatccaaaaagattccctttttatctcccaccacaaaattcccattaaaggtctcaatttctccatcaagatcgaaacttttcaacaaccctttacgcgtggcggcgccgccgtctgtacccacttcggattcggcggaggagaagcggatcgaagaagaatacggcggagataaggaagaagaagggtctgagtttaagtggagagatcattggtatccagtttctttggttgaggatttggatccgaatgtgccaaccccgttccagctcttgggtcgagaccttgtactctggtttgatcggaatgatcagaaatgggctgcctttgatgatctctgccctcaccggctcgctccttta

SEQ ID NO: 126 - DNA, 515 bp, Arabidopsis thaliana
  misc_feature (1)...(515): n = A,T,C or G
ccacgcgtccggagagatagtgaaccagatattattgatggggctggtgctgaacctggtcatgtgattagaaccacactccgtggtcgaaatggtcaatcaagacagacagtcagttacatatcagaacatgttgttggtactggttcctttggcatggttttccaagctaaatgtagggaaactggggaggttgttgccatcaagaaggttctacaagacaaacgctacaagaacagggagctacaaataatgcagatgctagaccatcccaatgccgttgctttaaagcatagctttttctcaagaacagacaacgaagaggtttatttgaatcttgtccttgaatttgtgcctgagaccgtcaatcgtgttgcaagaagttatagtaggacgaaccaactgatgccattgatatacgttaaactctacacctatcnnatttgcagggcgcttgcttacatccacaattcctttggtctttgtcaccgtgatattaagcctcaaaacctgct

SEQ ID NO: 127 - DNA, 515 bp, Arabidopsis thaliana
tgaggaaaatgtagtttttttgttgtttccttgtaagagaagcgtaattgaaaagtatttcgaagtaagtaagacaaatataaagtctgcaaaactagccaatccccatgggaaggataaatctctctctttctctcttgctctctctctatttatctccctttttgaccattcacaattccacatcacctccttttcaaaacagctctggatcactctgcctgaaccataaccggctttccccgtcccattgagaatcctctggtcccatcaggcattcgtggtccaggtggttgctgtttccccatgcctggttgctccatgttgttcattggattgttcgaaggttgtgttcccacttgatgatgatgatgatgatgatgatttcctcgcccattgtggttgtggttttggttatggctgtggttgttgttctggttttggttctggtgtggttgccctcgtcctcgtccctttcctctacctctgttacgcccttttctctgcccagccgc

SEQ ID NO: 128 - DNA, 515 bp, Arabidopsis thaliana
ttttttttttttttttttttttttttttttttttaaccatcaacttctaattagtttatagcttctcatacatatacttttgtcctccaaaacatagcagtacttgtatacatacacacgtacacacacatgtacatatattcgaaatagaagtagaaacagaaacagacacagaagaaattttaagggcacttgaggcggccaccgtgagtggtaatggaggcgtagcaaggacaaaggtgggtgtttccagaagtaccaggtggcacacagttgcagcgggaacaacagctgttgcacgctctcaagcatagcttcgttctcgaagatttgctgcatctatctttgcatctcccaccacaatcgattttcactacgccttcaccgacctttgcaccatcagcagcgtggacgtgaagctcataagtggtgagacagacgatgattagtaacagaaccagtgtacttcggaagactgccatgttcgaaactcatgcaatttctgtgagttgtac

SEQ ID NO: 129 - DNA, 515 bp, Arabidopsis thaliana
ttttttttaccttcacatagattttctattgtgcaagatattcaattatatattacagtcgatatttcgaatttacatatatttacaagagtgacagtttatgttggttcacttcagtagataaacaaaccaaacagatcctgaaagctgaccacgtagaagagccatggaggactctttcgtccggccatagcttgaaagaagctttatttacagtttcttcagcaaataatccgaagaagagcatagcttttgacgatatatctaagagcagtgtcttagtctgagaccagaggagatcgatctatttacagagttcgtgaatttgcctttgaacatattattttattcaggacggaagttgaccaagtttggcagatcagtcgcctgaagcttcctgatgtcattagcagagagcttgcaggactccaaggtcagagatctcaagttcttcaatggcttcaggtgacgtagtcctgagcttgatactcgagagtttgagacgttcagagaga

SEQ ID NO: 130 - DNA, 515 bp, Arabidopsis thaliana
gacatgtctaggcaaggtcaagacaaaggagacggccatcaaagcgacggctagagcaacgactgcgtgaccatcctttgctgaagctgatcctcccttatccgtggacgtagctggagttgccggagactttcctgctggtgccaccggtgttgttgtggcattgtttgtgaatacggctgcgtctggcgagctaggtgaaatccctagaagctttggacagttggtaatgctagcgttgtggagctgacaagaagttgggagttgaatgagtttgtcttcttgaacaccaagatccttcaaggcttgtcctcctgtcttcgcttgttgtataacgaaacacaaacactttggatctctttctttgatatcttcaacagcgtcacaacacttcttagacggaattgttgccttcccggtcgcaaagtccaaacacaaagtcaccttttgaaaatcctggttgcattcatcagccagagctcctccgggagcagccggtgcagcggcggcgatgg

SEQ ID NO: 131 - DNA, 515 bp, Arabidopsis thaliana
ggcgactcaaggtcaggttatcacttgcaaagctgcggtggcttacgagccgaacaagcctctggtcatcgaagatgtgcaagtggctccacctcaagctggtgaggttcggatcaagatcctctacactgctctttgtcacaccgacgcttacacttggagcggcaaggatcctgaaggtctctttccttgtattctaggtcatgaggctgctgggattgttgagagtgttggtgaaggagtaactgaagttcaagctggagatcatgttatcccttgttatcaagctgagtgtcgtgaatgcaagttttgcaaatctgggaagactaacctttgtggcaaggtgagatctgctactggtgttgggattatgatgaatgaccgtaagtcgaggttctcggttaatgggaaacccatttatcacttcatgggtacttccacgtttagtcagtatactgttgttcatgatgttagcgtcgccaaaattgatcctactgctcctttggataaagttt

SEQ ID NO: 132 - DNA, 515 bp, Arabidopsis thaliana
cggccgccttgaccaggggatctgtccgctctcccttggctcagtgtcttttgatacgttacaccagccaggttatccgtgacatggccaaccacggtcaatctggagaacgtccgttctatgaatttttggagagttgcctgcgccataaggcagaaatggtgatccttgaggctgccagggcaattactgagcttgatggtgtgacaagccgagaactgactccagcaatcactgttcttcagctctttttgagttcccccagaccagtgttgagatttgccgctgtccggactctgaacaaggttgcaatgactcatcctatggctgtcaccaactgcaacattgatatggagagtttaatctctgatcaaaatagaagcattgctacactcgcaataaccacactattgaaaacagggaacgaatcaagtgtagaacgtttgatgaagcagataactaattttatgtcagatattgctgatgagttcaaaattgtggtcgtggacgcaata

SEQ ID NO: 133 - DNA, 515 bp, Arabidopsis thaliana
cggccgcaccggtttatggaatgactgattaccggctacaaccaacgatgaatctttggaccaccgacgacaacgcttctatgatggaagctttcatgagctcttccgatatctcaactttatggcctccggcgtcgacgacaaccacgacggcgacgactgaaacaactccgacgccggcgatggagattccggcacaggcgggatttaatcaagagactcttcagcaacgtttacaagctttgattgaaggaacacacgaaggttggacctacgctatattctggcaaccgtcgtatgatttctccggcgcctccgtgctcggatggggagatggttattacaaaggtgaagaagataaagcaaacccgagacggagatcgagttcgccgccgttttctactccggcggatcaggagtacaggaaaaaagtgttgagagagcttaactcgttgatctccggtggtgttgctccgtcggatgacgctgttgatgaggaggtgacggatacggaa

SEQ ID NO: 134 - DNA, 515 bp, Arabidopsis thaliana
cggccgcgatctacagtaagagagttgtccatcatgactgcaaagagccatccagcagcaatgcgatttgttcctgatcagcacccgagagaaggcgaattggatgaagataatttgtcttctgatttgtcagaaagggaaccctcaagatgtcttatactgagaggaaatggggagctttcacttcttgatttggttgatggacgagagagggaacttacagactcagttgaactattttgggtgacatgtggtcaatcggaagagaagacaaatcttgtcgaggaagtatcttggctagattatggacaccgaggaatgcaggtttggtatccttctctaggggatgatccttttatgcaagaggatttcctgcagctggatccagagttggaatttgatcgtgaggtgtatcccttgggacttttaccaaacgtgggcgtcgttgttggagtttctcagagaatgtcattttcggcaagcgcagagtttccgtgttttgagcctacacccca

SEQ ID NO: 135 - DNA, 515 bp, Arabidopsis thaliana
  misc_feature (1)...(515): n = A,T,C or G
ccacgcgtccgaattctgaaaaatgggattacctcaaaataagctcagttttttctgcttcttcttcctcgtctctgtactaactcttgccccattggctttctccgagatcttcttagaggagcatttcgaaggtggatggaaaagtaggtgggtcttgtctgattggaaaagaaacgaaggcaaagctggaacctttaagcacactgccggtaaatggcccggcgatcctgacaataaaggtattcagacttataatgatgccaagcattatgcgatttctgcaaagattcctgagtttagcaacaaaaaccggactcttgttgtccagtactcagtcaagattgaacaagacattgaannnnntggtgcttacattaagctcctgtctggctatgttaaccagaagcagtttggtggtgatactccatacagtctaatgtttggaccagatatatgcggaacacagacgaagaagcttcatgttatagtttcatatcagggacagaattatc

SEQ ID NO: 136 - DNA, 515 bp, Arabidopsis thaliana
  misc_feature (1)...(515): n = A,T,C or G
aaaactgcaaaaaaaagagagagatcattaatccatcttcaagatgtctcttcctgaaactaaatctgatgatatccttcttgatgcttgggacttccaaggccgtcccgccgatcgctcaaaaaccggcggctgggccagcgccgccatgattctttgtattgaggccgtggagaggctgacgacgttaggtatcggagttaatctggtgacgtatttgacgggaactatgcatttaggcaatgcaactgcggctaacaccgttaccaatttcctcggaacttctttcatgctctgtctcctcggtggcttcatcgccgatacctttctcggcaggtacctaacgattgctatattcgccgcaatccaagccacgggtgtttcaatcttaactctatcaacaatcataccgggacnnngnccaccaagatgcaatccaacaacgtcgtctcactgcgaacnagcaagtggaatacaactgacggtcctatacttagccttatacctcaccgctc

SEQ ID NO: 137 - DNA, 515 bp, Arabidopsis thaliana
  misc_feature (1)...(515): n = A,T,C or G
gatttgaatcggcagtccgtccagatccaaaagaggctgcattccttaaatcccttggttgggatgagaatgatagcgacgaatacacccacacaatggaggagatgagagaatggtgcaagaagttcaagccatcactgctgcagaagctgcctatcatataagaagcaactgaggacatagctcccgactcgtgatcagattttgttcggggttttcagatggaagatagtttttcattctcttttcttttctttattctctttggttttttttttttttcttttggttacttcggcgctggctagaaggtggaaaggctttagttgcagtaagagtattgttctgcttcttcttcagaggtgcaacaaaatgaaaaatggctgactattttgtacatctttggtctgaagataagtgggctttgtctatggcatcttcttttaggtnnnctaatgtttgatgatcattcatggtgagggaaagagaaaattgccgatgggggttaagtagaa

SEQ ID NO: 138 - DNA, 514 bp, Arabidopsis thaliana
tcttcaactatgaaatatcaatctccaaatagccaaaaaacatactcgccagccaaaagggaggtagtcgtattaactgttaatttaatttgaaagaaaagtaaactctcactcacgttcatcataattctctctagctttgaaatataaaggaaaatcggtctcaggtaacacctctccgcagcttgtaaatctcaactgtgcactgaaaaaaacaggtattaggacttgggttttagggaactcagatttcttagtccgaatcattcatgaagcgttttcctaatctccctcctggtgcaacccgaaagccgtctcctgcttttctctcacaaaatttggatcaagcgcttgagacagaacttaagagctcggtaacctttccaacagcaattgtttttccttcagttcgtagagtgaatcttccaagttgagggaaatctgagaatttttcaatacaaattgaattcgtaacctggatgcggcacacaacagcagcaccattcttcacaaa

SEQ ID NO: 139 - DNA, 514 bp, Arabidopsis thaliana
cggccgcgatataacaaaatgtggaaagtcagactgaaatatatggagtttgtcacaagtccaagaaaagtttttaggcatataacttgctgagttcatctttgaacttggactttatttgttctctctttatcttaagagcagcagtgaccaatcccgactccggtgtccacggctctgacagcaacttgatctttgctggaagctcaaacttttcgagctttgccgccttcccggccttggtaagagattgttgaacctccttgactgcttcacctttctcgcatagctcagcgaattcgctgtgtttaactccagcttcctctgcccatttctctaatgctcctcgtgatggaacaacaagagctacacagtagctgttaattgggtctgcgtggaccatgatgttatcaacgtaattgctcgaacccaaagctgcctccacctttccaagggatacgtattccccatgttgaagtttaacaatatctttctttctatcgatgacttcgag

SEQ ID NO: 140 - DNA, 514 bp, Arabidopsis thaliana
  misc_feature (1)...(514): n = A,T,C or G
aatcgaatatttattatttcgccccgaagattctatttctgatcatttacacccctaaaaagagtagagctttcgtgaagccaccatgtgtggaggagctataatctccgatttcatacctccgccgaggtccctccgcgtcactaacgagtttatctggccggatctgaaaaacaaagtgaaagcttcaaagaagagatcgaataagcgatccgatttcttcgatcttgacgatgatttcgaagctgatttccaagggtttaaggatgactcggcttttgactgcgaagacgatgatgatgtcttcgtcaatgttaagcctttcgtcttcaccgcaactactaagcccgtagcttccgctttcgtctccactgtaggttcagcatatgccaagaaaactgtagagtccgctgagcaagctgagaaatcttctaagnnnaagaggnagaatcagtaccgagggattaggcagcgtccttggggaaaatgggctgcggagatccgtgatccgaga

SEQ ID NO: 141 - DNA, 514 bp, Arabidopsis thaliana
tctcaaatctcaatctccgattatgacagacgacagagtttaccctgcatcaaaacctcccgccatcgtcggtggcggtgccccaaccaccaatccaactttcccggcgaacaaagctcagctctacaacgcaaatcgtcccgcttaccgtccaccagctggtcgtcgtcgtactagccatacccgtggatgttgctgccgttgctgttgctggacgatattcgtaatcatcctcttactcctcatcgtcgccgccgcatcagccgtcgtatacctaatctaccgtcctcaacgacctagcttcactgtctctgaactcaaaatctccactctcaacttcacatccgccgctcgtctcaccaccgccatttccctctccgtcatcgccagaaaccctaacaaaaacgtcggattcatctacgacgtcaccgacatcacactctataaagtatccaccggcggagatgatgatgtagtcattggtaaaggaacgatcgcggcgttttctcacggg

SEQ ID NO: 142 - DNA, 514 bp, Arabidopsis thaliana
gctttttcagtatcatagagacactttttttttattacaaatggctttagctgttacttcttcttcaactgcaatctctggatcgactttctctcgttctggagcttcttctgaatctaaagctcttcaaatatgttcgattaggttatctgatcgaaaccatttgtctcagagacgttactctatgaaacccttaaacgctgagtcatcacatacaagaagcgaatcttgggttcttcgtgcttcaactctaattgctcctgaagttgaagagaaagaaggagaagttgaagactttgagcaacttgctaaaaagcttgaagatgcttctccacttgaaatcatggataaagctcttgagaaatttggagacgaaatcgcaattgcttttagtggagctgaagatgttgcattgattgaatatgctcgtttaactggaaagccatttagggtttttagtttagatacagggagattaaacccggaaacgtacaggctctttgacgcagtcgag

SEQ ID NO: 143 - DNA, 514 bp, Arabidopsis thaliana
tagcagggcttcaagtgacctatgaatgcaacaagaaaccacaaggtcttactcaagatgctattaactgtttacaccggcaaacttttagctcagccgaggttaaatccgagatgagagattgtagcatatgtttagagagtttcactaaaggtgacatgctaatatccttaccctgtacccatagtttccattcttcttgcttaaacccttggcttagagcttgtggagattgtccttgttgccgtagagccatagcaaaggaatagaaacttgtaaatagaatctttgcctaaccattaggccatagccatacacatcttctcttcttcttgctatagacatccttaaaacgatcttctgagttttgtcgcccatgagtgtttttttttactgtcacatgtttgtaatggtttttgttgtgccattaggcagttcaagcgttgatatcgtatggtgtgaatctttttagttttattcactgtgatctctcttttaatgtcttgttgcggcc

SEQ ID NO: 144 - DNA, 514 bp, Arabidopsis thaliana
  misc_feature (1)...(514): n = A,T,C or G
ttccatcacattaaaactgataaccaaagaaaagaggtaatttgtccaaactgtgtctcactctcacctaaacaaaactacaaaacagaggaaanangaaaagnaaagaggatgcctcagtagttcttctctaacaaaaacccaagacgacgaccaaccataaaataaattgaacatatattcctaagcgactctaaacaaaacagaccacaagctaaaacactgtcaatcaatggatagtaaanaaaaaagaaggggaatgagatacacttatggcaaacatgtcttcttgatggacagaagaagcaaacatagaaagaaagtgagagaacaaggagatagaaannaaacatccaacgacttgggcttttttcttctttttatgtttgtgtaagagaaacctcactctcaagcagctgcctggactggtggtccatctgatctgttgttgaaaccaccatcaccaccacgtcctcctcctcttccacgtcctccccttccacgtccacgtcca

SEQ ID NO: 145 - DNA, 514 bp, Arabidopsis thaliana
tcaggagccatgacacaacttaaggtatccctccaactcgcagcaggagactcatagagatcagcattagagtgatatttaagctttttggttttgtctcgggtatagaacattttcctcacttctggatcttggtcgtgaaaccgacgaataccatttatcatcttctccatcacatcaagtggaaccccatggttaatcgcctggaaaaatccaaacttctccattgcgtctttaaccttcgcaactacactctctcgcacgaccgtggattcgaacacgccacctagatcgattgttggaatcatcaccaccgtcgatgtaggcttagggtttgctacgttaacatgcgggttatggaaaatgcgcgggacttttgtgactccggcgtcgacgagtcctttcacgccaatcttcatctcgtcgaatgcttttaactcactggcacggtcgtagttttccgccatagtgttttttattttgtattttttgacctgcccgggcggccgctcga

SEQ ID NO: 146 - DNA, 514 bp, Arabidopsis thaliana
ctttttttttttttttttttgtctaaccgcttagcttttccacatattattttaaattcttgaaatagttttattgtaccacatatagaaaccctcaaaaggaagctattaaagaattgtctccttgaacaattcatcatcatttattgtaggtattgagggttttcagtagacaggaagatcttcgagcgcccagcctcttatcttctggtcaatatagtcattatatattaaagtctcgaatttgggaggattctcgtctccggtaaactccggcaaaggtccgacggacatatcagccctaggtgcaacaaaaacaggccaagaaatcctcaatttgtccttatcagacttcgctctgtgaagaacgttctttaacctcccgttggtcatcctcatgagttgatcgccaatgataacaaccacggcggagtcgatatagtcaaggtccaaccattgttcgtccttgaaggcttgaagtccaggaacctcatttgggatgaggagtgcgatt

SEQ ID NO: 147 - DNA, 514 bp, Arabidopsis thaliana
ggagagagagttagattgtatgttcgtggaacagtcctcggttacaagaggtccaagtcgaaccaataccctaacacttctctcgtccagattgaaggtgtgaacactcaagaggaggttaattggtacaagggtaagcgtttggcttacatctacaaggcaaagacaaagaagaacggttctcactaccgttgcatttggggcaaagtcactaggcctcatggtaacagtggtgttgtccgttctaagttcacttcaaacctaccacccaagtcaatgggagctagagtcagagtcttcatgtaccctagcaacatatgaggaggctagatttcaacaagtatcggaaggaatcgccattatcatttctcaggagctgtagttttatctattcacttttattctagactctctgttggttttgattttatcttgagacgaagtaaaacattttttttcttgagatcatatactatcgagtattaatggaacttgagaaaagctaaaaaaaaaa

SEQ ID NO: 148 - DNA, 514 bp, Arabidopsis thaliana
ttttttttttttttttttttttttttttttgtacaacacacaacattcatcattaaatatttcttactccaacaaggtaaaaaacctcattaaaaacaataaattatacttctaattttcactcctcaactttcttccctctcctactcttgattctttattttctttttataattatctttctttttacccacaaaccaacaaggtattaagtggtaaaacatatagaggaaaaaaataaggtagaaaaaaccatgatcaacaacaattattgggttaatatgcatatatattcgagtaaaacacatactcgactacatatacacatatatagataatatcataagcttaatttatgcttctttgtaaattacccctttttggtcttaagggtcttcttatgtggcaatgcagaaaggctcaacggacaagagagacctccttcggtccttgcaaccatttatccaaccgtcacccattgatttgttgacaaagttttgggcttgaaattggg

SEQ ID NO: 149 - DNA, 514 bp, Arabidopsis thaliana
cttttttttttttttttttttttgctagaaagttttgctgaaattcaagcatttagcattacacgaatgatcatgggagttttacattgtctttctaatttgtttctcttctcaaaccgaaaacctatcttgacctgaagtacaaaaaacaaaaacaaaaaagaaagtgaaagtctttgtgtcttgttgcactttatttcgagatatgagacaatgttgtgaatagccttgtttccaaatcaagtttcagacaaaaccccctcagagagaatggtccgatcttaaatctcttagaagaatgacttggccgcatcaacaacagcttcaacggtgataccaaactccttgtagagtaagggtgctggtgcgctggctccgaatgaattaataccaatggactttcctttgcctccaacaatctttccccatccgaaagtcgaagctgcttcaatgctaactctagctgatacatccgatggcaacacactctccttgtattcatctgattgctcgt

SEQ ID NO: 150 - DNA, 514 bp, Arabidopsis thaliana
cttcgagagttggggtagtgaacatcttcatgacgcagagcttacgaagtctcctccaatgggtaccgtaaggagaccagaggatgtcttcaccaccgtaagtgttgatctttccgacttcagggagatcgtggttggcgaaagtgatgtcgtgggttttgagaacctcgcgagccatgtcaggggaagagacgacgatcgcaagtttggaaccgaggtggatcttcatgagagggccatgttttagggttagggcttggaattgcgtgtggaggacgtcagagtttaggaacgggaggttgccgacgatcggaagtggccaaggtcccggaggcaacggtggtccgttcttggatttggacttcccctgtatccagaaatagcaaacaacggccaagagagcggcgacaccgagcattacggagctgtagggttcctcaatattgaggatctgcgagagagagaaattagaagacgccgtttccatctttggcttcagagagaaatatctcac

SEQ ID NO: 151 - DNA, 514 bp, Arabidopsis thaliana
aagcttgtacctcggccgcgaccggcgcgccagaatcgagcggccgcccgggcaggtcaacatttgcaacaccatcgacggtgataggcctcggaggatcatccatcaccaccaaacccttctcttcatcctttttaaaaccaacattaagcgccaagaaccctttgagactcgccggtgcatcgggaggaagagtcacttgctttgagaggaactggttgaggagagatttgaacgtggtaggatttgggctgatcggatggctagctccgtcgagcattccagcgataaatgggaagagcctgacgggtctcttcttcgatagcatcggaactgagctcgctcacttcccgactcctccagctctcacttcacagttctggttgtggttggttacgtggcacttaggcctcttcctctgcctcactttcggacaaatcggattcaagggcaggactgaagattacttctaaggataactattcttgttttcgtttgtacctcggccgcgacc

SEQ ID NO: 152 - DNA, 514 bp, Arabidopsis thaliana
  misc_feature (1)...(514): n = A,T,C or G
gcggccgctttttttgataaatctatgggcctacacttttgggcccaaatttatataactcttctcgcgttaatcagaaactgatgctacttctcaaggttcttacaaaatgtgtaacaactaacaagtaagaactaaagaacacaaatctcaaatttgcttttccagtttctcaggtctagaaggaagagattcctgccagcagtctaaacttctcataggagacccaaaacacgaactgccacggtccaagccttgcccatgtcgggaagaaacctttccacaaagctcttattccttcaaacttaaccgtcttcaccaaacagtcgtaagaatttctgtacacagcattttcaccctggttcatcatcctcgtcttcaccacatcagctggacaactcaaacttgtcgaagcaaganncgacattatagaagcaagagtgtgcgcanaaatgttatcctcagcaatcttcttatcgatgacaaagtgtttggcgtgatcatagcaagctag

SEQ ID NO: 153 - DNA, 514 bp, Arabidopsis thaliana
tttaaccaacttaaaaagtaaactaaaccaagtcggttatggaaaccagaccagctaataaaagcgaaattgtgtatgtaaatggtgtaaagaagaggaatcaaagatcagcttttccaggatagcgagggaaaggaataacgtctctgatgttatcaagtccagtagcgaagagaatcatacgttcgaagccaagtccaaacccacaatgcttcactgttccataacggcgcaagtctaggtaccactcatatggctctattggaagacccatctcctcaatcctctttttgatgacatcatatcgttcttccctttggcttccaccaatgagttctccaacctttggaacgaggacatccatggcagcaactgtcttctcatcatcgttaagtctcatgtaaaaagctttgattcctttcgggtagttatagacaataagtggcttttgaaacagaacctctgtcaagtatctttcatgctccgaggctaagtcgattccccactccacatt

SEQ ID NO: 154 - DNA, 514 bp, Arabidopsis thaliana
ccacgcgtccggcaaaatccacgagagaaacagatagaaagttgcaaaagtgcgttcgatttttgcttcttcttctgtttcggattcggatttggatttggaatctgctcctttagcagaaccagaggaaatggtgacgtacgtgagcgcgttgttctacggattcggagggatagtcgtcgccggagtggcgctgctcgtggctttccaggagaagcttgtgtacgtcccagtgcttccgggtttaagcaagtcttatccgatcactcccgctaggctcaatctcatctacgaagatatttggcttcaatcatccgatggtgtacgtctccacgcttggttcatcaagatgttccctgaatgtcgaggtccaaccattttatttttccaggagaacgctggaaacatcgctcatcgtctggagatggttcgcatcatgatacaaaaattgaagtgcaatgtattcatgctttcatatcgcggctatggggcaagtgaaggctatccttcacaa

SEQ ID NO: 155 - DNA, 514 bp, Arabidopsis thaliana
gaagaagatcgtgagaagcttaatgggttggatcccgtgttctgggaaatcgagtgggaggaataagacaaggaggaacggtgaccacaaactcgacaggaagtcttctgattgttctgtgtctacttcagagaaatctagggccaagtcgtccttgagtgaatccaaaagtaaaggctctgatcacattgtggcacaaacgtttacattctctgagttagctactgccactagaaacttcagaaaagaatgtcttataggagaaggaggatttggtagagtttacaaaggatacttggccagcactagccagacagcggctatcaagcaacttgatcataatggtttacaaggaaacagggagttcctcgtcgaggttctcatgttgagtcttcttcatcacccgaatcttgttaacttaataggatattgtgctgatggagatcaaaggcttctagtctacgagtacatgcccctaggttcacttgaagatcatttgcacgacatttcacct

SEQ ID NO: 156 - DNA, 513 bp, Arabidopsis thaliana
tttttttttttataggagcataagaagacttcttagttctctcaagaccaaaatagaaatgcaattcataggtggagaataatgtaatgcaccacatcatcaatctatttgatgaactttaataaacaacaaactcgtttcttaaaacaggaattttaaaagtaatactgctcttaacatatttcatagtttttctttttccttcggacatgtcaatgaacaccacattcctttttaagaggaactagccggtgttttgggttcatcgcctgatttggaggctggaggaggagtgccttctactcccatctcggctcttagatcattgatgctttgctccagctcattgattctgcctcccatgtcatcaatctttgtgatgatggagtccgacattgtctggaacctggtttgcatctgctggagaagattttggacaaaagcagtcatatcagcagtgctctgcttagtatcctcagaatcatgaccatccatttttagggttttcttgcg

SEQ ID NO: 157 - DNA, 513 bp, Arabidopsis thaliana
taccaaaaacaaattttgtagacttattattaaacaacaaccatacaagaaaaacttccacaatctattttttgttgtaaaatttggactttttgaaatttgacgttacatatgaaatgttatggaccttgcctaaggaaacacatcttccgactatgcagcaaaatcttctggtgaggaaatctatgtgtctcatgacctcccacgtaaagaacaaaaagatatttaagaatcacagtgaagagaagaaacctctattttattcatccaccatgattaatgagcttgatctgattcttcttgctaagagcataaaattttcaccaacttatttctccatcttaagatgatccttcattctccaagctgcatttgttatgcaccaagatcaagtgaaagccgctggctattccctctaaaccaacatctcgaaaagcattcaagatcctcaagcaagcagaagcatcaaactctgtcgttttagactctttccactgatggataatctcctcg

SEQ ID NO: 158 - DNA, 513 bp, Arabidopsis thaliana
tacgttgctttcactgacagcgagcgtctcatcggggatgctgccaagaatcaagtcgccatgaaccctaccaacaccgtcttcgatgctaagcgtctaatcggaagaagatacagtgatccctctgttcaagcggataagagtcactggccttttaaggttgtttccggtccaggtgagaagcctatgattgtggttaaccacaagggagaggagaaacagttctctgctgaggaaatctcgtcgatggttcttattaagatgcgggagattgcagaagctttccttggttctcctgttaagaacgctgtcgttacagttcctgcttatttcaacgactctcagcgtcaagcgactaaggacgctggagttatctctggtctcaacgtgatgcgtatcatcaatgagccaactgctgctgctattgcttacggtcttgacaagaaggcgtcgagtgttggcgagaagaatgttttgatctttgatttgggaggtggtacctcggccgcgacc

SEQ ID NO: 159 - DNA, 513 bp, Arabidopsis thaliana
  misc_feature (1)...(513): n = A,T,C or G
ccacgcgtccgagaactagtcagtttctttgttttagacaacaagaatctgtgaactaacacaaaaacattgaaagaatgatcttaacaatgaaacttgttcaccctctccatcactctttgtcttcctccattccctttccctcaagaaaaaggcaatccaaaccgtaccggtgctcgttaccttctcccggctgcgaaaaggtcatcagaacagagactgtcctgcctccggcgccggtgagttgtgaagggagaagggtcttacttggatgtcttctcgctacagcttctgggattttgtcaactggttcagccgaggcagtaagcaccagtagaagagctctacgtgcatccaagttaccggaaagcgatttcacgactctccccaatggtctcaagtactatgatataaaggttggcaatggagcagaggctgtgaaaggatctcnnnnnncagttcactatgttgcaaaatggaaagggataacgttcatgacaagtcgacaaggac

SEQ ID NO: 160 - DNA, 513 bp, Arabidopsis thaliana
gactcactctcttttctctctctatgaaaaagctttgccggaaaggaaccgttcatccgtcgccaccgccggcgataaagaccgacgaacagtttctatctcttctccccgtagctatcctctctctcgtggcggcgctctcggtggaggatcgtgaagttcttgcttacctcatctcaaactccggcgactcaaatcgtatctctcgtctcaagaaaaacaaagaagataatcatcactctcctctctttctttgtgattgttttagttgttacacgagttactgggtcagatgggacacgtcaccgaggcgccaactcattcacgagatcatcgatgcttacgaagatagtttggagatgaagaagaaaaagaaagatcggagaaagcgatcgggaaaagcttctggacgagttaactcgataggaacgagtcgactcagtgaattgggttcgagttcagccgagtttgctggtggtgactcggagaaagatggaaattgcggcggtgaag

SEQ ID NO: 161 - DNA, 513 bp, Arabidopsis thaliana
gcggccgcgttttttttgtttcaataggaaatgtctgttgctgatgttgctttaagcccgattcatagaggatcggcgtttgctgttggtggtttcggacaatcgacgacgacgcattactctgttaaatcggttttggtgttccttagtgtttctggttctacgatgcctatgctcatcttggagtctgattctattgctgaggttaaacttaggatccagacttgtaatggttttagggttagaagacagaaacttgttttcagtggtcgagagcttgccaggaatgcctcacgtgtgaaggactatggtgtgactggtggtagtgtgttgcatttggtgcttaagctctatgatcctttgcttgttactgtgattactacttgcggcaaggtctttcagtttcatgtggatcgtcgtagaaatgttgggtatttgaagaaacggatctctaaagagggtaaagggtttcctgaggttgatgatcaagagatcttgtttaaaggagagaag

SEQ ID NO: 162 - DNA, 513 bp, Arabidopsis thaliana
ggcgactcgtgtttctgactgtagctctgctaaacgcggcggtgatcttggttcctttggtagaggtcaaatgcagaaaccatttgaggaagcaacttacgcactcaaggtgggagatataagcgatattgtcgatacagacagtggagtccacatcattaagagaacagcttaaccttatctgatctgatagaaaatgtatcgaaggtgccagcgtcgtttcccttctcttcttgaccagaagaacatagaagaagaagaataagaagaatttaattcaaggttattgttattgtggttttgattctgaatctgtctatgaatttgatacaactcaaacatatgataaaatcagacaagctatctcatttcttcttaaaggcttcataagcactccctgtcgtagacagtgacttgtataatcacatttcagtatctttgtcatggtcttactgcaacattctggcatcttgtgtgttgtcattttgctcttaaactaaaaaaaaaaaaaaa

SEQ ID NO: 163 - DNA, 513 bp, Arabidopsis thaliana
tttattgaacagatgcattatacaatctgattttatgttcccaataatgtagaagatcatatagatacatacatgctcaaatgaagaaacaaaaactcagagttgcgttcattggtttaggggaaaaccataactttatgtttctcacataagcttttcttctccaatttcttcatggtacaaatctacatactcctaaaacaacccaaggagagaaatatcctataaagaagtaagtacctgaagatgattaatatgtaaaggctagtgattgcaggtaagctcgagcttgagcagccatgaccagagattcttcatcttctcgttcctttgcggtattcactgctgctacataagctaatcttgcttcttccattttcctcaggtcagtttcatctacatcgtctaaatatggaagatgatcaaattcatatgggactgcatcataatccctatcgggtttcttggaatcagtttttgccaaagtttcgaacacccgtgtgaatgtagaga

SEQ ID NO: 164 - DNA, 513 bp, Arabidopsis thaliana
aataagaatgcttaataattcatatgagaaaatgatgtatttcaaatgccatcgttttgctttgccttggattccttgtaaacgagagaatctgaataagcgatgttcacacgtcttttgcctttacggtgatgcctaaacttatttatatcaacaaacttctttccttctttgttgttattgccatcatgcttcctaatatcaacttcttggatagactctaagaccttaaccacctcacacattgtaggtctatacttaggatgttggcttagacacttgtatgctagggaagcagctacctgagccgcttctgttttgtgctggttcgcgagcctcgggtcaattatcctctctaactttctttggtcccttaacataggccgcgcccattccactaggctttgttccctccgtgttcgggtattgtccattgaccgttttccggttatcagctctaacaaaactactccaaaactgtatacatcattcatcgtcgtcaaatgaccagtc

SEQ ID NO: 165 - DNA, 513 bp, Arabidopsis thaliana
aaaacgatttttattcatgataggaacagtacgtatgagataaacttgaaaccctagtatcaaccatatgagttggttaaatacaaaaagatattgagaattctgatttgaatctctttggatggatcacacaaaaaaaggagaccagttcattattgatctgtttgaggaaatgatatccgcaagaaagtgtaaattgggcgtcaaccacaaaacaattaacaaaccggcttttggtatatatagagagattagtgagctaaagctttaaccgctttctcagctgcatcatccaaatcatcagctgttatgagtttcattccactttccttgaggattctctttccctgctcaacattcgttccttctagacgaaccaccactggcactttcaatgcgacctcttttgcagcgttcacgattccactagcaatcacatcacatttcattatcccaccaaatatgttcaccaagattgctttcactttatcgtccgatgtcagtatcttaaac

SEQ ID NO: 166 - DNA, 513 bp, Arabidopsis thaliana
tcctaacacaagttatgacaacatcagaatcaaattcagagtatacaaaccctaatttactaattcaagagcttgtgaatttggtaacagccttggttccttcagaaacagcgtgtttagcgagctcaccaggaagaacgagtctaacagcagtctgaatctcccgagaagtaatcgtcggcttcttgttatacctagcgagctttgaagattccgatgccaatttctcgaagatgtcgttgatgaaactgttcataatacccatagccttgcttgaaataccaatatctggatgaacttgtttcagaaccttgaagatgtagatcttgtaagtttccacactcttcttcttcatcttcttcttcttatcgccgccggccccggcttccttcgggagtttcttgccggcttttggtttcttctccgccggagctttctcggcttttgatttctcctctactggtttctcggcggctggtttcttctccgcgggcttcttctctgctctcggcg

SEQ ID NO: 167 - DNA, 513 bp, Arabidopsis thaliana
caaggacgtattatctcaaatggaaaatacaagacacccaaaataaatggaaacttcaaactttctttgaacaaattactcaaacaaaaaacacatttaaacaaatttcccattttttcaatgtttttcaatcaaatttaaatagagagatttccaagagtcgtttccttgtcttttaagtaaaatgtttgatttggtggatcaagtctcataatctccctcctcttcttcttcaacatcatactcaccttcctcatcagcagtagcatcttggtactgttggtattcagcgaccaaatcattcatattgctctcagcttccgtaaactccatttcgtccattccttctcctgtgtaccaatgcagaaacgctttacgcctaaacatagccgtgaactgctcactcactctcctgaacatttcttgaatcgacgtcgagttacccacaaacgtcgccgccattttgagcccctttggtgggatatcacaaacgctggatttcacgttgtttgg

SEQ ID NO: 168 - DNA, 513 bp, Arabidopsis thaliana
tattccttaaacttttccattttagtatcatttcatattcattgatatggatgtctccaacacgatgctccttgtagctgttgttgcagcttactggctatggttccagcggatctcaaggtggctaaagggtccacgtgtttggccagttttgggcagtcttccgggtctgatcgagcagcgtgaccgtatgcacgactggatcactgagaacctccgtgcgtgtggcggcacttatcagacatgtatctgcgccgtacctttcttggcaaaaaagcaaggtctcgtgaccgtcacgtgcgatcccaagaacatcgaacacatgctcaagaccaggttcgacaactaccctaaaggtcctacgtggcaagccgtgttccatgacttcctcggccaaggtatcttcaactccgacggtgacacttggctcttccagcgtaaaaccgccgctcttgaattcaccaccaggacgttgaggcaagcgatgggtcggtgggtgaaccggggaatcaa

SEQ ID NO: 169 - DNA, 513 bp, Arabidopsis thaliana
  misc_feature (1)...(513): n = A,T,C or G
tttttttttttgaaaccaacaagataaatatcttttcctaaagtgaaaccagagtaataaaaaggttcctgaggataaaaatcctcaataaagaaacacttagagacgatgagaagagtaccaagtaaacttgtgaacataaaaaaagtgagacagatggagagtcaactcttataagaaatagatgacctttgtctaaaaatcatcatcgtcttcctcagccatatgcttagcaagctcttcttcctgttgcttcctctctctcctcttctcatcgctttctttctccttgtgagtgttaggaggaaacctcaatgctctgacagcttcgttatgcatgttgaggcagaaagcaattcttgagttgaacgcagtttgtggctcattcgtcgagtagatgtnnncagtttctttngagaccatgcatccgtttttgtgatcgattgtagcatcaatagctccgtcgcgtatggcctttgccacgatgctttccgcatcagccacagggttttc

SEQ ID NO: 170 - DNA, 513 bp, Arabidopsis thaliana
ttcgcggccgcgtttttgctttgtagcgccggaccggagaagataaaacccttgctccgccccactcacaggaagttctacatcgacctgagttctcgtacttcgtcgtatcactcgttcttcctacgatgaactgtgcaatttcaggagaagttcccgtggagccagtggtttcgacgaagtcaggattactcttcgagagacgactaatcgaaagacatatatcggattatgggaagtgcccggttactggcgaaccacttaccattgatgacattgttcccatcaaaactggggagatcataaagccgaaaacattgcatacagctagtatccctggattgctcggaacgttccagaatgaatgggacggtttgatgctatcaaattttgcactggagcaacaactacatactgcaaggcaagagctaagtcatgccttgtatcagcatgattctgcttgtcgtgtgattgctagacttaaaaaagaaagagacgaagcacgccaattac

SEQ ID NO: 171 - DNA, 513 bp, Arabidopsis thaliana
  misc_feature (1)...(513): n = A,T,C or G
ggtggatttgcagaggtgtataaagggatattgggtaaaaacggtgaagagatagcagtgaagaggataacaagaggaggaagagatgatgagaggagagagaaagagtttttaatggagattggaacaataggacatgtctcacatcctaatgtcttgtctcttcttggttgttgtattgacaatggtctctatcttgttttcatcttctcttctagaggctcccttgcttctctccttcatgatttgaatcaagcaccattggagtgggagacaaggtataagattgcaattgggacagcaaaagggcttcattatttacacaaaggttgtcagagaaggatcatacacagagacattaaatcctccaatgttctcttaaaccaagattttgaaccacagatatctgattttggattnncaaaatggctgccttctcaatggtctcatcattccattgctccaattgaaggcacatttgggcacttagcaccagagtactatacacatggg

SEQ ID NO: 172 - DNA, 512 bp, Arabidopsis thaliana
tcgagcggccgcccgggcaggtgctttttggagaagaaaccaaagaaaacattcgaaaccctaaaatctccattagaattcgaaaatgacaaagaagagaaagctcgaaggagaagaatctaacgaagctgaagaaccgtcgcagaagctgaagcagacgccggaggaggagcagcagcttgtaattaaaaatcaggataatcaaggagacgttgaagaagttgaatacgaggaagtagaggaagagcaagaagaagaagtagaagatgatgacgatgaagatgatggtgatgagaatgaggatcagacggatgggaatcgtatagaggcggcggcgacgtctggatctggcaatcaagaagatgatgacgatgaaccaattcaggatctgttggaaccattttcaaaggagcaagttttgagtcttcttaaggaagcagcggagaagcatgttgatgtagccaatcgaattagggaagtagctgatgaggaccctgttcatcggaagatct

SEQ ID NO: 173 - DNA, 512 bp, Arabidopsis thaliana
attgaattacgccgagatggagaagagattcaaggtttatatttatcccgacggcgatccaaatacgttttatcaaacgccgaggaaagtcaccggtaaatacgctagtgaggggtacttcttccagaacattagagagagtcgatttcgaaccctagatccagatgaagcagatctcttcttcattccaatctcttgtcacaagatgcgaggcaaaggaacatcatatgaaaatatgactgtgattgttcaaaactatgttgatggattgatagctaagtatccttattggaatagaactttaggagcagatcacttctttgttacatgtcatgatgttggtgttagagcatttgagggatctccgcttctgattaagaatactattagggttgtgtgctcacctagctacaatgttggtttcattcctcacaaagatgttgctttgcctcaagttcttcagccatttgctctccctgctggtggaaatgatgttgagaatcggacgactc

SEQ ID NO: 174 - DNA, 512 bp, Arabidopsis thaliana
gggtcaacgtcgaaaagctcatcggaatggagaaactctgtcaaaactgacgaccctttctcaacgtcctctcgccggagttgccctaaatgggaatcttacaccgtcttccaaaagtacgacgaagaaatgacttttctcactagaatctctgctcaaaagcttcacgaagcagaatctttgaagtcaattatggtggagccaagatctatctcggagaggatcgttcacaagttatcatcaaacggtcacaagaaaaaacaaaaacaatatccaggcagcaatgggtcgagaccaaacccttacgtggaactagaatccgcttacgtggcacagatatgtctaacatgggaagctctaagttggaactacaaaaacttcgagagaaaaagatcaaccacgcaacgaagcttcaacgacgtaggatgtcccgccggaatcgccgaccaattccgtacgtttcacattcttttacaaagatacgtagaaaatgaaccttatgaacatggaag

SEQ ID NO: 175 - DNA, 512 bp, Arabidopsis thaliana
atggatcgggccatatccgcccgtgccgagttgactaattccggcaagaactgcacggatagcaagaaacaagcagttttggcggattgcattgacctctatggagacacgatcatgcagttaaaccggacattgcatggcgtgtctcctaaagccggtgccgcgaaaagttgcactgacttcgacgctcaaacgtggctgagcaccgcgcttacaaacaccgagacctgccgacgtggctcatccgatttaaacgtcacagacttcatcacacccatcgtttcaaacaccaaaatctcccacctcattagcaactgcttagccgtcaacggagccctcttgcccgctggaaacaaaggcaacaccagtgctaatcaaaagggctttccgacgtggctttcccgtaaagataagagactcctgcgtgccgttcgagccaacctcgtggtggccaaggacggatcaggacatttcaacacggtacaagcggctattgacgtggcgggacggag

SEQ ID NO: 176 - DNA, 512 bp, Arabidopsis thaliana
taggttacaggctcaattttcacagatgaggccggtcaatatgccacctgcggttggtcctaggatgcaaatgtatccaccaggtggtccaccaatgggtcagcaactcttctatggtcaagggcctcctgctatgattcctcagcctggattcggatatcaacaacagcttgtaccgggtatgagacctggtgggtctccaatgccaaacttcttcatgcctatgatgcaacaaggccagcaacagcaacagcagcaacagcagcagcagcgacctggtggtggtagaagaggagctcttccacaaccacaacaaccttctcctatgatgcagcagcagatgcatccaagaggtcgaatgtatcggtatcctcagcgagatgtaaacacaatgcctggtcctactcaaaacatgctttctgttccatatgacgtctcaagtggtggtggtgtgcatcatcgtgactcgcctacttctcaacctgttcctattgtagctttggctacacggc

SEQ ID NO: 177 - DNA, 512 bp, Arabidopsis thaliana
tttgttgatttactaaattggtatacatctagtgtttggtaatatataggctagagttaagtatctttaatgatacaacttccattgcttgcttcattatctcatccgcatgcaacctattacttctgacaagcctctcaaggaagaacccattgtccagggaagagctgcatcagagtctttcccagaatccagtccatctcagaacttgacaaggatgcttcttttgcaatgatagtcacagcttctttagcttctttatatccacattcaagaacaacaaatgggaagtcactgccccacatgacacgatttgccccaaaatgggacacaagttgagataggagaggcgataggtcctgatacgggaagccggttcttgagatcctgaatagagcactgaatttcacatatacctgtggaaatctagacagcttcatgagttgagaataagcaagctttgcctcaccactttctggtactttgcagaatccagcgtgatctagtaaaac

SEQ ID NO: 178 - DNA, 512 bp, Arabidopsis thaliana
tttttttttttttttgaaccaaaaccatgattatatatctcaaaagataagctgttttacaaacatatgaaacaaaatcataagagatattgaaattatggtccaacctagacacacttgcaaaatataccaacccatccggattactacaaatacaagttacttcacaccctacagagaccaaactaaaagctctttggtctctcagaaacacaagctttcataatttaaaaacattatataaaaaccaaacaacgacacaaattaaagactcttaaattatgagctaattaaaggtcttagattcatgcttcttcatgttcacttgaattccatgatcatgttgttctccggagccagtccaacgcacgccctcataatattctccagcatagcccgctgcttcgacagtgcgttaatcaccggagttcccggcggtacaagtggtgccttggtgaggtagctgagtatggtggccacaggatggaaagagtgaaactttccctctccct

SEQ ID NO: 179 - DNA, 512 bp, Arabidopsis thaliana
ccagctagtgttgtatcatatgctatcaattcaaaggaatataaggagtggatcgttaacaaaggtcttgcttctagtagtagtagcagcaatttgaataacagagagtctgaaccttccgccttctcgacttggcgttctctgtcgatggatgttgattacattcaacacgcggtgtatggatcttctcaagacgatagaaagtctccgcatttgaccatttctttcagcgaccgcgcttcttcttcctctactgccactgaaggtaaagtgaagttctctgtgacgtgttattttgcaacgcagtttgacactctgagaaagacttgctgtccgagtgaagtggactttgtgagatccttgagccgttgtcagagatggtctgcacagggagggaaaagcaatgtttactttgccaagtcattggacgagaggttcatcataaaacaagtcgtcaaaaccgagctggattctttcgaggattttgcacctgagtacttcaaatatttgaa

SEQ ID NO: 180 - DNA, 512 bp, Arabidopsis thaliana
gaaactaacaaaacaaaaaaaaaaatggaggccgggaaaacaccaccgacgacgacaacaacgacggagaagaaaacggagcaagtgaaagacaacgacttgccgaccgatagcccttacatggcgacgggtactttggaagattacaaattgaaagcttatggagccgaaggtcaccaagagcctactcctggtcttggaggtggctccaccgatgctcctactccttctggcgacgcacccgccgccactaccaccgatgcgaaagctccgtgaaaaaaaagaaagactataataatgaacgggttttgtggatcgtcggaaaacaaacccataattgtagtatgttcaataactgatccagcttcgtttcttaacgtttttatggtttaattaaaaatgtatttgcgtctaatgctgaatgctaaagttcgagtttcgtatcaaatgaagttgtaacgatttaataattaatgtgaagcttatttctttttgataaaaaaaaaaaaaaa

SEQ ID NO: 181 - DNA, 512 bp, Arabidopsis thaliana
ttttttttttttttttatagaaaagtagctcattcatattcccagctgaatcagccacaaatcttattaatcatacggtttctcaaactaaggttaataaatagtacattattaagtcaatgtggtacacgaaccaaccgcatgcgagagctaagataacaaagaggtttaaaagccgagcaagtgaagcattatagcattttgagcatgcatgcgattctccgcctgtggaaagacaatggaataaggagcctctacgactccattggtcacctcaactcctctctctgcaggcaaacaatgcatgaaataggctttttgacccgccaacttcatcagagcttcatccacctggaatccttggaatgctttccggcgagcttcggcttcatccttttgacccatactggcccatacgtctgagtacacaacatctgctccaataacagcttctttaggatcattggtgatctctatcttacttaatccagcttgctttgccggacgcgtgg

SEQ ID NO: 182 - DNA, 512 bp, Arabidopsis thaliana
  misc_feature (1)...(512): n = A,T,C or G
cgattcgtgcaaatcgacggcagcaactctattctgccgcgcagacgccgcgtttctctgcggcaactgcgacggtaagatccacacagctaacaaactcgcatcacgtcacgaacgagtttggctatgtgaagtatgcgaacaagcaccagcacacgtcacgtgcaaagctgacgccgctgcgttatgcgtcacgtgcgaccgtgatatccactcagctaatccactctctcgccgccacgagcgcgtaccaatcactcctttctacgacgctgttggtccagcaaaatccgcttcctcctccgtcaatttcgtagatgaagatggcggtgacgtcactgcttcgtggcttttagctaaagaaggaatcgaaatcactaatttgttttccgatcttgattatccgaagattgaggtcacgtcggaggagaatagctnnnntaacgacggagttgttccnnngcagaataagttgtttctcaatgaagattacttcaatttcgatctctctg

SEQ ID NO: 183 - DNA, 512 bp, Arabidopsis thaliana
ccgcccgggcaggtgtcaactcttgtatcactataaattcacctaactggcttcatctgctattcatcctcacatcttataattctctatctctcttctcaggctcccattatctttctctattttgcaaatcagtatgggtaagttcacaaccattttcatcatggctctccttctttgctctacgctaacctacgcagcaaggctgactccgacgacaaccaccgctttgtccagagaaaactccgtcaaggaaattgaaggagacaaggttgaagaagaaagctgcaacggaattggagaagaagaatgtttgataagacgaagccttgttcttcacaccgattacatttatactcagaatcacaagccctaagtttctgtattagagcaattaattaactaattacattatcaaacctatcactgtagtactttctgttttctgttcgtctttttgttttgttttgtttatgttatggctattttaaagtttcattgtcaaaaaaaaa

SEQ ID NO: 184 - DNA, 512 bp, Arabidopsis thaliana
tttgtctctctcgcttctgtgatttgggctttttcagatgggaaatgcgaacggcaaagacgaagacgccgccgccggtagcggtggtgcagatgttacctcgtcctcggcgagatctaatggcggcgatccttctgcacgcagtcgtcaccgtcgtccttcttcagactctatgagcagttctcctcccggaagtcctgctcgatctccatctcctttcttattcgctcctcagcccacattgttattccacgttacatcttacaacatttgctcacctatgcgtcacctcttccattgtttaggcttaacatgtgtacctaatggctgcatttcgtgtcggatggttcccgtggctccattgcagagagcaaacgcccctcctcctaataacatccaatggaaccaatcacagagagtttttgataatcccccagagcaaggaatccctaccatcattacatggaaccaaggaggtaatgatgtggcggtggaaggatcatgggacaatt

SEQ ID NO: 185 - DNA, 511 bp, Arabidopsis thaliana
acgcaaaagcataagaacatgttgtaaataggatttgctactatgcgaatgtgtaatgctaaaagaagacatagtcgctcttgcattgtgttacagaaacatgagtgaaacaacagaacattctaaaaactgtaaaaagcttttattttttgataaattcaacgatcctccagattagttttctttcccttttcaattggcttttgactcaatgaccttcttggcgaaagaaggcaagcagaatgcagctgaatgaatctcggcattgtaaaacttcaaaggtccatttgatttgctggagctctcgtcaattgggttcagtgggtgtttgaagtcaacatcaggtccttcagttgaacaaagcataaatccaatgaccccactggggtatgttggaacgctggtccaagcatagttcacagaacccttgaagatctcacggcagttggaaacaatgtcttcgatgatgtccatgtgaagccacaagctttcagcttgagtgcacacaact

SEQ ID NO: 186 - DNA, 511 bp, Arabidopsis thaliana
cttttttttttttttttttttttatccccaaaatattggaactttataacatcaaacatctttagctttcgacattgtctgcaactaagcaattatttggcaagacggaataaacagcttcaagaaaaagaccagtgcaaccttagtctgctactgcatatgggcagtgactgatacattgagaaaccaaaagcatataaaaaagaaggaaaaatcaagaagctgcttattcctttttgccgattccattcgacatgttgtagattcctgttccaatcatgtagagagaacttgcagccaaggcaataggaatagcaacagaagtgatcttgtccattggtcctttcaagtaagtgtgcctttggatgctctggaacaatctctgtttctccagaagcttctctcgtggcctaaatggagtttcagtcaacatgatctgagagaaattaatcgacgagataaggaattttgagagggagagataatcgcagcgtaggtcgcggacgcgtgg

SEQ ID NO: 187 - DNA, 511 bp, Arabidopsis thaliana
  misc_feature (1)...(511): n = A,T,C or G
ttttttttttttttttttttttttttttttttttttttttttgtagtaaaaannccttagagattggtgtttgtatttatcaaatgacttcttttaaaattcttaaagaaataatatacaacaagaagaagaaacatagtggtagcacattcataacagaatcaatggaaagttctgttgggttcgtatcagacacatcaaaaatcaaaaggcagaaccgctgttgttggattttccaagcatcatatctttggcttcattgatcttagaagcaagatagtgactgcctccagcgtctgggtgatttgcaaccatcactctccggtgagcttccttcaccttatctgccacaacactctccctaacaccaagaatgagagcagcttctcggcgggtcatagaactttggaaaccaccttcataaaacctgcgcattctaggaacacgaggtcttgccttgaaagcttgccaagccaatataccatatctaccagcaacagcagcagcagct

SEQ ID NO: 188 - DNA, 511 bp, Arabidopsis thaliana
tcgagcggccgcccgggcaggtggcggaactacagaaccaagagcctctttctaatcggagttactttaatccccttgaaccatgtcaaagagaaagactaaagagccaaaggtcgatgttgtgactcttggaccatctgttcgtgagggagagcaagttttcggtgttgtccacatctttgcttcattcaacgacactttcattcatgttactgatttgtctggtcgtgaaactcttgtccgtatcaccggtggaatgaaggtgaaagctgatagagatgagtcctcaccttacgcagctatgcttgcagcacaggatgttgctcagcgatgcaaggaacttggtatcactgccatgcatgtgaagctccgtgccacaggtggaaacaagaccaagacacctggtcctggagcacagtctgcccttagagcccttgctcgttccggcatgaaaataggccgtattgaggatgttactcccatcccaacagacagtacctcggccgcgacc

SEQ ID NO: 189 - DNA, 511 bp, Arabidopsis thaliana
aacttcaacaatcgcttctaatcgtttgatcacattgcacaaacattattaatagagcttatgatcaaagagtgttgccggaaatatggggaagaaagggagtggtggatggttctcgacggtgaagaagaaagtcttcaaatcctctcctaaagactccaagagagagaacaacattggtagtaataacgccgacatatggcagcagcagcatgatacgcaagaagtcgtgtcgtttgaacattttccggcggaaagttcaccggagatctcccatgacgtcgagagcacagcatctactccagcaactaatgttggagacagaaaacacgctatggctgtagctatagccactgcagctgctgccgaagccgcggttgcagccgcacaagctgccgctaaagtcgttcgacttgccggctacaaccgccagacggaggaagatagcgccgccgtgctaatccaatcgcactataggggttatttggcgagacgagcacttcgtgcctta

SEQ ID NO: 190 - DNA, 511 bp, Arabidopsis thaliana
  misc_feature (1)...(511): n = A,T,C or G
gtctttatcggacataagcgatccaagctcgcccatgtcggttatggatgatctctctcactccttcacatcgcagaagcttcgtttgttcacgttgtctgagctgagagtgattacgcataatttctctagaagtaacatgttgggggaaggagggtttgggccggtttacaaagggtttattgatgataaggttaaaccgggtatcgaagcccaaccggttgctgtaaaggctcttgatcttcatggccatcaaggccatagagaatggctggtaacatttctttctctttatgtatgtttttgtctacattcaagacttttctattcacaaggaacaatttaattacgaagaccgtctcgattattttatatattttttgaattttggtttatcttcttaattagctatatgaatctggccatntttcagtatgttattaaatatatatatcttttgtgaaatttcttcataaagttttttttttcagtgtatacaaaatttattttt

SEQ ID NO: 191 - DNA, 511 bp, Arabidopsis thaliana
  misc_feature (1)...(511): n = A,T,C or G
ctccattgattgtgagtgagaacaaacatttaaagcttcttactcaaagtttctttctttatagatctcaaaaaattcgatatttttctcgattcatccgccattaaggttttattgcgagatcgaagagagaaggagaaaatgacgcatagagtagatcaggaatatgattatttgtttaagattgtgttgattggtgattctggtgttgggaaatcgaatatcttgtcgagattcaccaggaatgagttttgcttggaatctaaatccactattggtgttgaattcgccaccagaactactcaggttgaaggaaagaccattaaggcccagatctgggacactgcaggtcaggagaggtacagggcgatcacaagcgcgtattacagaggcgcagtgggtgcacttcttgtctacgacattactaagagacagacctttgacaatgttttnnggtggctgcgcgaactgagagaccatgcagattccaacattgtgatcatgatggctg

SEQ ID NO: 192 - DNA, 511 bp, Arabidopsis thaliana
  misc_feature (1)...(511): n = A,T,C or G
gcggccgcaatccattacagagggattgtggagtggtttggtttgatttgatttcgatctgtgacaatggtggagactagtatcgacatggaggaaggaactctcgagatcggaatggagtatagaactgtctccggagttgctggacctttggtcatccttgacaaagtgaagggtccaaagtaccaggagattgttaatattcgcttaggagatggatcaacgagacgtggtcaggtcttggaggttgatggggagaaagctgttgtccaggtttttgaaggaacatctgggattgacaacaagtttaccaccgtgcaattcacaggagaggtactgaaaacgcctgtgtcattggacatgcttggnngcatatttaacggctcgggaaagccaattgataatggccctcctattttgccagaggcataccttgatatttctggaagttcaatcaaccccagtgaaagaacctaccctgaagagatgatacaaacggggatttctacca

SEQ ID NO: 193 - DNA, 511 bp, Arabidopsis thaliana
ggtcgcggacgaggtactgtcggttgggattggagtcacatcctcaatgcgaccaattttcatgccagaacgggcaagggctcttagagcagactgagcaccaggtccaggggtcttggtcttgttaccaccagtggcacggagtttcacatgtatggcagtgattccaagttccttgcatcgctgagcaacatcttgtgccgcaagcatagcagcataaggtgaggactcatctctgtcggctttcaccttcattccaccagtgatgcgaacaagtgtttcccgtccagacaaatcagtcacgtgaatgaaagtgtcgttgaatgaagcaaagacgtgaacaactccaaagacttgctctccttcacgaacagctggtccaagagtcacattctcaacctttggctctttggtctttctcttcgacatggttcaaggggattaaagtaactccgattagaaagaggctcttggttctgtagttccgccacctgcccgggcggccgctcga

SEQ ID NO: 194 - DNA, 511 bp, Arabidopsis thaliana
tttttttaagctaaagatttgtttagaaactaatcaaaatcacaaagtagtgtttctgttccctcggatttacaaagacaaaagcattagagagagagtaaacaacaatgctctttaagaagattcatcattcttgtaaataagactatagaatgtgatgagatatttaaagtttccaaagttgtgaaaggaactgaacaaacgaaccacgacacagaggccaagtcaacaatggcgaaactcgagttttcaccattttctttgttttccagttatcttttttgctcttctcttcccttttagacagatgggaagtacttgttgagattgaaaggtagagagtagaattcttcacttcttgtgtcacctttgaaagatctaaacttgtcccaccaatgcttccctctgtctttccttatcgaagagtctttcttgtgcagtgtgttgtccaagaagaaggcgacgcttccagcaacaaaaggctctgaggagaacgggacatttaccatat

SEQ ID NO: 195 - DNA, 511 bp, Arabidopsis thaliana
ggcgattatgtctttgaaaaacgatgcgagtagtagccacgacggtggaagcaacagagaaagcgtaatcgatgatcatggccgccgtaaaagcacttgcggctactgtaaatccccagctcggtccagtatctctcacggtttatcagcacagactcttaccgtttatgactaccaagctcttattgaccgaggctggagaagatctggtacttatctttacaaacatgagatggataaaacgtgttgccctccttatacgatacgtttgaaagcaagtgattttgttcctactaaagagcagcagcgagtttctagaagactagaaaggttcttggatggcaaactagatgtgcagcccagggaacaaagaggtgcttcttcctctggtgatgtttcagatacaaggagaaaaacacttggagctgctaaaagtgaagagaataagaaagttgaagcagttatggatgatttgtctaaaaatattgaccaagctgtgcaattatgcata

SEQ ID NO: 196 - DNA, 511 bp, Arabidopsis thaliana
gcctattctcttcttccttctaccatttcaatccaaaaagagggcaaattcaatgcttctctaaaggagacgacttttactggttcttcattttcaaaccatcttagagctgaaaagatatccaccctgttgaccatcaaggaacagagaagacagaaaccgcgattttccaccggtattcgtgcacagacagttacagccacgccgccggcaaacgaagcatcgccggagcaaaagaagactgagagaaaaggcactgcagtgatcactggagcttcgtctggtttaggtttagctacggccaaagctttagcagacacagggaaatggcatgtgatcatggcttgcaggaactttctcaaggccgagaaggcagcgagatctgttggaatgtccaaggaagattacacagtgatgcatcttgatcttgcttcgcttgaaagcgtgaagcaattcgttgaaaatttccggagaacagaacaaccactcgatgttcttgtctgcaatgccg

SEQ ID NO: 197 - DNA, 511 bp, Arabidopsis thaliana
  misc_feature (1)...(511): n = A,T,C or G
tttttttctttttttcaaatctaaacaaaaacaatctcattgaaatttgatgtctcgaaaagctttatttcgaagcaaacaacaatatgtaaaaagcaaatgacaaaattcaaagggagagaagtggccagctattatattgtttcccaggagggtccatatttatttgtcaattggtggcattcatcacaagcatgttttcttgggggaaatttctctcaagattttcagaggttgttgaagtcaacaggttcacggaggagcctctccatctgttgtgcccttgtcctgattgacatgtccaacaccttttgttggaactctacgattagtccaccgtagatacttggatcaatcttttgttccacagtgattttcttccctgctccaatgatctcctganncgtctcagtcagttnnntctcctcagcagggggangcggaatgactgtggtaaccaaaactttgacatctcccctatgtgcgtttgtcagctgcataaatttcttca

SEQ ID NO: 198 - DNA, 511 bp, Arabidopsis thaliana
attggactcagctaggtgatgctctatcgtacgcttgctcacaggggaataatacctgtgacccgattcaacgcggaggcccatgtcagaaacctgatttgaccgttttgcacgccagctacgcctttagctcttattgggcccaatttcgtaagatcgggggaacttgctccttcaacggcttagctacacaaaccatcaaagatccaagttacggacgatgtgagtttccgagcgtgacattgtgaagacttacgagttacgaaaatgcatggtcgagaagagacgcacgagggaaaaccgcacgatgttacggctttcattaatggaaacagcacgtgactctctgtacgatgttacgtagcttgattatttagaaacggcacgtgattagtgtttaacttgctgtttatttattttatttttcttttcccgcgaataatgaaaactcatgaaataattaattcgttttcgggtaaaaaaaaaaaaaaaaaaaaaaaaaaaaaaaaaa

SEQ ID NO: 199 - DNA, 511 bp, Arabidopsis thaliana
cgttctctagttttttcctcagtctctgttcttagatcccttgtagtttccaaatcttccgataaaaatgtcgggtaaaggagaaggaccagctatcggtatcgatcttggtaccacttactcttgcgtcggagtatggcaacacgaccgtgttgagatcattgctaatgatcaaggaaacagaaccacgccatcttacgttgctttcaccgactccgagaggttgatcggtgacgcagctaagaatcaggtcgccatgaaccccgttaacaccgttttcgacgctaagaggttgatcggtcgtcgtttctctgacagctctgttcagagtgacatgaaattgtggccattcaagattcaagccggacctgccgataagccaatgatctacgtcgaatacaagggtgaagagaaagagttcgcagctgaggagatttcttccatggttcttattaagatgcgtgagattgctgaggcttaccttggtgtcacaatcaagaacgccgttgtt

SEQ ID NO: 200 - DNA, 511 bp, Arabidopsis thaliana
tttttttttttttttttttttttttagattaactcattgtattaaaaaagaaaaaaagcgtcacacttaaataaaaccataagtcaaagaatccaaacgcacaaaattaatagcttagtttatttatctgatccacattttcaaaatggatcttaacattacgcagacgcccatgtatacgaacgcctagccgacgagcgcttgctttttacacttctgggacttttttccactcttgagagccagagaacgctttttgatatattgaccaccacaaagcttacccttgagagtcaagtctcctctatggcccatgactcttctaactatagcttggcgttcaacatgctccccaatctcaaaaacccgctcatgggctcgaggctctgccaagcccttaaacgttatgtagacatgtgccctgtaggctttgagtctctcattagacggctcctcatctttggtagcagtttctatcgccactttcacaatctccaacttggacagaact

SEQ ID NO: 201 - DNA, 511 bp, Arabidopsis thaliana
ttttttttgatttagaattatgtccttatccttaaaagatccgagcctctatatacatacgcatgtattagattatacagcgaatgtttttttcatcttatgttgagaaagaaaatgaattagacagcaaaacgaacaacaccctttctctctgtacacaaatttataaattaaacgaccaaaatgagattcaaaaaaaaaaaccgaacacgagagagatcaaaaacgaacaaatctccctccctctctcttttgtctctcttctacatgaagtagctcaacgacgtcttcttcctcgatcctccttcaccatacagctcgttccattgctgaagttcgttcatgttcgacgagtctgaagacacacttgcgcatacctgatcatgggcagccttgaaatcgttcattgtcagggaacgaacatctgtgcagctatacaatggcggtgtgggacggttctcagcctgagctgcagttttctccttcttttctttctccagtatttctcgga

SEQ ID NO: 202 - DNA, 511 bp, Arabidopsis thaliana
ttttttttttttttttgagaaaacacgagacatttttattcaaattcaaaaccaacaacaaaatcaaatcatgaagacgaaactaacaacatgaatcaacaaggaattgggatcacctttgatatggttttacacaatgtgtacacatatctagagctcatctttgacatcaccgtctttcggggtaggattagaagacgatagcttgatcggatacgatgcctccatcgcaataccgcaacgcccttccggttcatcaatctctctttcaatctttatatagcctccctctccccattcagctccccatgagtttctcactatccaatactttttccccctctcagatccatacccgaccgctgccacaccatggttcagctctgttccacaagatcccgtaaacactccctctgaataaaactggaaatctgaacttccagcatcaattgcaacagatacaggttggtttgcaacagccttaagaagagcattttcgtcgttttcgggt

SEQ ID NO: 203 - DNA, 511 bp, Arabidopsis thaliana
  misc_feature (1)...(511): n = A,T,C or G
attcgcggccgccatctcgtttctaatactacgatgatctagagaaagtacacaacccaaacaaaacaaagaggacaacacgatttgcttcatacaatattaatcaataatttttgtagccaacaatacgtaggaacacattacacaacaatctctcaaagaccgagcgagaaggggaaaccggtcgacgataaccagcctccaccaccaataaactgaccagccgtatatttttgagcttcagcagcagccgtaattaccttaaagcccctccacttcactctatttgcagttccagcccctgctcctgtgttcgaatactctctgtaagtcagagtgttcaacgcaaaagtcccggtccactcggaccacccttcgggtcggatcacgtcggagatagccgactgcattatcaccgtttgtgaatattccttccatggccgacccnngtacgtcggaaaactacctttcaccgactgtaaatccgacgtggcaccgatcctacatttct

SEQ ID NO: 204 - DNA, 511 bp, Arabidopsis thaliana
taaactatggccccgccggcaggacaaacggcggcggtggctgaagcggctggcgccgatggtgctccaccgcagcagcagcgtggatttggttccacgatttccggcatcgttagaatcgccgtcttttggtattttgcttctaagttcttttctcctaagcagaaacctatggatcccactgctccgtctcagctcatgactaatctcttccacaagggcgaatcattggatatgtggttttatctatcagagcaggagaagttcaatgactttggcaatgatcgtgcgctatattggcatgagacgaatataccttatgctgtatggacaccagagagtattaggaccaagtcacttacgtattatccatctgagacactacagaataatggaagtctgtatgctcatatcttttttgctcgatctggatttcccattgaccccactgatcctgaatatcaacctcttaatagttttagtaggacgcatgctgtggcgacttactttc

SEQ ID NO: 205 - DNA, 511 bp, Arabidopsis thaliana
caaggagtgattgaggttgcccgacatcctgaagctgtaaccgttgttaccggaatagtaggttgtgcgggactaaagcctacggttgctgcaattgaagcaggaaaggacattgctcttgcaaacaaagagacattaatcgcaggtggtcctttcgtgcttccgcttgccaacaaacataatgtaaagattcttccggcagattcagaacattctgccatatttcagtgtattcaaggtttgcctgaaggcgctctgcgcaagataatcttgactgcatctggtggagcttttagggattggcctgtcgaaaagctaaaggaagttaaagtagcggatgcgttgaagcatccaaactggaacatgggaaagaaaatcactgtggactctgctacgcttttcaacaagggtcttgaggtcattgaagcgcattatttgtttggagctgagtatgacgatatagagattgtcattcatccgcaaagtatcatacattccatgattgaaacac

SEQ ID NO: 206 - DNA, 511 bp, Arabidopsis thaliana
  misc_feature (1)...(511): n = A,T,C or G
gaaagttctgatacggcggcttctcactgtcatctagctgtaccactgacgataaatctctctcttcctctaaatcgttaacttatacttgcagattctcgcgttgatagtaaaaagatggtgaagcttttggagctgttcataacttcatcaaaaccagtcgttgagattctgttgataacatcagtcggattttatatggctctcgatggagtcaatcttcttggtcatgatgctcgtaaatatctgaacaacattgtcttctatgtgtttagtccttcgcttattggaagccgtttagctgatagtgttacatacgaaagcttggtcaaaatgtggttcatgccggtgaatgttctgcttacattcatcattggttcattacttggctggattgttattgtcatcactaagcctccttcacaccttcgtggtctcattcttggtnnnngtgctgctgggaatttggggaatatgccactgattataatcccagctgtttgtaaagaaa

SEQ ID NO: 207 - DNA, 510 bp, Arabidopsis thaliana
tttcattagaaaggagaataggaaatattgaggaagctaaaggaggaatgataaatcgcaagtagtttcaaaacaaacaaacaacaataaaactgtgtctcttataagaatcctgagctatccctcactcagattatcacatgaaagttttctaccattataaaatgactcttcctcttcttcgggtttactcggcaccatcgggctttgatgcctccttaatctcatctcctgcttcgtcagtcatatctgaagtccagagagtgagattgtctctaagaagctgcataatcagtgtactgtccttgtatgattcctcacccaatgtatctaactcagcgattgcatcatcaaacgcctgctttgcgaggctgcaagcacgatcaggcgagttgaggatttcatagtaaaacacagagaagttgagtgcaagaccaagccttatcgggtgagtaggagctaactcagcagtggcaatgtcggaagcagacttgtaagcaaccaaagtgc

SEQ ID NO: 208 - DNA, 510 bp, Arabidopsis thaliana
cttttttttttttttttttttttggtgcagaaaaacgacacagcgtgttactaatcaatgccaaaatattttacatatgaaacaaagaaaagagagaaaagcttcttaaatcttaatccgagtcactaaggtaaagttctcatgagagtagggtaacgagggaaacgaattcaagggtaactcttccctttgatctcgtgttgatgacgaaatgctccgggtattttctcagcagcatcagcaaaccgtaccatggtttaccttttgcttcagggatagcccagtcttcttgtgataggtatcttcttactcgactgtgatgccatacgtttccatactcctttaatatcaccgaatgaagtttttccataggcatccactctcccggaccacacaaatcggaaagcacagtggcaacagacgatacaacatctttttcctccagctgcaaaaattgttgatcatcagcttcacgatctacctttgatcttccctctctcttcttctctc

SEQ ID NO: 209 - DNA, 510 bp, Arabidopsis thaliana
  misc_feature (1)...(510): n = A,T,C or G
ctttttttttttttttttaacgaataatcacaatgatattacttgagccacagactgtctatcgtatgttatcggacaagagtgacatcaaacagaaaaaaaagaaaggaagaaaaaacaatacaaaaaaaaactaaaacgtactgactttgatagaaatgttaaaaagaaatccccagaaactgcatgtttatcattctcatgctcagcccacaccatcatgaatagtttgagtagccatgaaaggaggagccaccagcatccgaatctttacccgtccctctttttccaccagcatccgaatcaggataagtactaggcagactctgacctctaaagtaagaacctagagctgaaagaccagcagcaccaacgcttggatcaacaccaatcccacccatttgactagactgtaccatatcagaacccaacccgccatgtgctagagcanncgctaacatcggatacatgtaacctcccccagctgctgctgctgctgctaaagctgga

SEQ ID NO: 210 - DNA, 510 bp, Arabidopsis thaliana
cggattctttttatttcttctgcaaaaatctcagagctaccctaaaaattctctctttttgactcacttaccagatctccactagattttactcaattctttttcaaaaggtttaaacttttatagattccttgaagtgggtctaagcaatgcttcagagaaattccgatgatttcttctctaaccaaaataaaaatgaagtatcatttgatagtgatttttgtgttcttcttttgattctcttatctcttccttcccatcaataaacccaaaaaaattaatatcatttttgggatcttattgatcccaaaattcgtaaatccgttgacctttgtcggcatgatttgttcttacttaccgtaaaaaaaacagagctaggttttagttttcggacatggaggttatgagaccgtcgacgtcacacgtgtcaggtgggaactggctcatggaggaaactaagagcggcgtcgcagcttctggtgaaggtgccacgtggacggcggcagagaa

SEQ ID NO: 211 - DNA, 510 bp, Arabidopsis thaliana
  misc_feature (1)...(510): n = A,T,C or G
gatcccacacaaccttctctttcttctcctcttgctcttgctccagtcagtaccgtatggattcggtcagactcagaccacaccacccggaacaacaaaaacgaaacctaacgatccagttgttgttgtaatcacggttttgtttttagtgatctttttcatggtcttcggttccatcttctgtcgtcgaagcaacgcacagttttcacgttcttccattttccgatccacctacgcagacgccgagtctcaggtcgtcaggatcaggaggttgacggcgcgtgggctcgacgcggaggctatagaaactttcccgacgtttctttactcggaggtgaaggcggtgaggatcgggaaaggtggtgtggagtgtgcggtttgtctctgtgaattcgaagacgacgaaacgctgcgtttgatgcctccttnntgccacgtgtttcacgccgattgtgttgacgtctggctctcagaacactccacgtgtcctctctgtagagcggatcttgt

SEQ ID NO: 212 - DNA, 510 bp, Arabidopsis thaliana
cttcatctgaaacaatggacaagaaacataatgtgaaagggaagaggttatggcagaaagtcaagtatcaattggtggagtttcattcattgcctgcttatttaagagacaatgagtacatcattggtcattaccgatccgaatggccgatcaaacagattcttctcagcatctttaccattcataatgagactttgaatgtttggacgcacttgattgggtttttcctgtttttggcgctcactatatacactgcaacgaaagtaccgagtgtcgtggatcttcattcgcttcaacaccgtttacccgatttgttgaggaaaacagatctccacaaacttcattctgagctcatggctcgccttccttctagtccatctagttggcatgtgatggaccttctttataactgtttgcctgaaagattttctcatggcaactacactgacatgtgtgttctgcattctgtgagggaagatcttgcaaacttgatagctcctttgatcttca

SEQ ID NO: 213 - DNA, 510 bp, Arabidopsis thaliana
cataaaacattatcctttgaaattaataaatattatagttttggctccgtcaaaatcgagtaataaaattattactcagttgcttattttagccatctaaaagtacgcatcgcaaaggtaacagagagacgagagacgagaccgtgagctctgaacaatgcaggatgcgaagaccaacgggtaagttgattcaatggaaacgtacatcgcttgcattaaaggcctctctccatttttctgattgcctcagcacgtttctcctccctgcagcttttggggttcggttttgtctccattgttgttagacttagaattggcttctacacgtttccctttgaatgagaaattgaatccagaagcagtagcagtggaggttgatacatgagcagaccctccaaaacgttttgaagaaaaatccatgcgttcgatcattcgtgcaacaccagctattcctgcattcatctcacgttgcactcctttgctcaattctttcactgagttattgcgagc

SEQ ID NO: 214 - DNA, 510 bp, Arabidopsis thaliana
agttttggcatcttcttcaggactctttccacgcccttggtcaggtacatcaactacgtcagatgtgctgcagaaatttgtcctcttggggacagtggtagcaaaggctttacaagatggacgagtcttagaccttccactttccaaagccttctacaaattaattctcggacaggagttgagttcatttgacatccacttcgttgaccctgaactttgtaaaacactggtggaattgcaagctctggtacgtaggaaaaagcttttcgctgaagcacatggtgattccggagcagccaagtgtgatttaagtttccatggaacaaagattgaggacctttgtcttgaatttgcattgcctggctacacggattatgatctcgctccctattctgcaaatgatatggtaaatttggataacctcgaggaatatatcaagggtattgtcaatgccacagtatgtaatgggatccaaaaacaagtggaagcatttcggtctggatttaatca

SEQ ID NO: 215 - DNA, 510 bp, Arabidopsis thaliana
ccacgcgtccgaaaagaagcagaatcattcccatttataacaaacctaaacctctcttttcttcttctctttacctttttcattccaaaatctctctctctctctctctttctctggctcgggaagaagatgtcacgtagttgctcacagtgtggaaacaacggccacaactctcgcacatgtccgacggacataactaccaccggtgacaacaacgacaaaggcggcggggagaaagccatcatgctttttggcgtccgcgtcacggaagcttcatcatcttgttttagaaaaagtgttagtatgaacaatctctctcaattcgatcaaactcctgatcccaacccaaccgatgacggtggttacgcttcagacgacgtcgttcacgcctccggtagaaaccgtgaacgcaaacgaggaactccatggacagaggaagaacatagattgtttcttactggattgcataaagttggaaaaggtgattggagaggaatctctagaaacttt

SEQ ID NO: 216 - DNA, 510 bp, Arabidopsis thaliana
aaataaaaaagagatggttttgatcaaagagagagagatggagattccagttattgattttgcagagttggatggagagaagagaagcaagaccatgtcacttcttgatcatgcatgtgataagtggggattcttcatggttgataatcatggaattgataaagagttgatggagaaagtgaagaagatgattaactctcactatgaggagcatttgaaagagaagttttaccagtcagagatggtcaaggctttgagtgaaggcaaaacctcagatgcagattgggaaagcagtttcttcatctcacataaaccaacttcaaatatctgtcagatcccaaacatttcagaggaactcaggtaaagtaattaagaattgaatagtaccaaaggctctaccatttttacctgtttgcttatttaactaaacaatgtgagagggtgaaattgatatttgcagcaagacgatggatgaatatgtttgtcaactgcacaagtttgcagagagac

SEQ ID NO: 217 - DNA, 510 bp, Arabidopsis thaliana
gatgcaatgctctatgtagccaactttgagtccgaggttgaatacttgaagaaatcttttgagactcttgaggctgcttgtgaagaactgaggaacagtaggatgttcttaaagcttcttgaagcggttctaaagacaggaaaccgtatgaacgttggaacaaaccgaggagatgcacatgcgttcaagcttgatacacttctcaagctagtcgatgtcaaaggcgctgatgggaaaacaactctcttgcatttcgttgtacaagagataatccgagcagaaggcacacgtctctcaggtaacaatacacaaacagatgacattaaatgccggaaactaggtctccaagttgtatcaagtctctgttctgagcttagtaacgtcaagaaagctgctgcgatggactcagaagtactaagcagctacgtctccaagctttctcaaggcattgccaagatcaacgaagcaatccaagtccaatcaacaatcacagaagaaagcaacagtcag

SEQ ID NO: 218 - DNA, 510 bp, Arabidopsis thaliana
  misc_feature (1)...(510): n = A,T,C or G
cggatttcgattcccgaggctcgaaaaaaccctaaatctcttctccgttcactcatccaaccgaagatgcgngagattcttcacatccagggtggtcaatgcggtaaccagatcggcgccaagttctgggaagtggtttgcgccgagcacggcatcgatccaaccggaaggtacaccggagactcagatctgcaacttgagcgcatcaacgtttactacaatgaagcgagttgcggtagattcgttcctcgtgcagtgctcatggatttggagcctgggactatggatagtctcagatctggaccgtacggtcagacctttcgacctgataacttcgtctttggccaatccggtgctggtaacaactgggccaagggacactacacggaaggagctgaactaatcgattccgttctcgatgttgttcgtaaggaagctgagaactgtgactgtctccaagggttccaggtttgtcactcgttgggaggaggaactggatctggtatggga

SEQ ID NO: 219 - DNA, 510 bp, Arabidopsis thaliana
gcgtccgcgagtctcttgtatgttcctttgagattatgaaaccagccccagcttcaagcagtcatcctctcaagaaggtaccgaagatggggaagtcttgaatatctagtcctctctatgtcaatatcacggttccacagctcaagctaggctcaagattctgagtgtcattacaactgtgtctgtgtctccaattatgggttgaatgcaatgaagaacccaaagggtacttacttagtcatcaaacaacttctgtaaaaaaacaaaaaaagtgagaaaacaaaaacacactttgttttctttgtatagatgcagaaaatgatctgtcttctgcttctggagattttatctccttattagtctctcttttctttcttcttttagcccttttagtttaatatagtaccacttagatttttttttctcggttatttttttccttgttgtacaaacccttttgcatatcgtcaagattccacattttcttcaaaaaaaaaaaaaaaaaaaaaa

SEQ ID NO: 220 - DNA, 510 bp, Arabidopsis thaliana
tttttttttttttttagaaggccaaagtagaaacgatatttgaatcccataaatatcaaatcacaaccattccccagttggcagtcattacacatcaaatccagagaagatgacattgacgatgaaagatcactaacaacaacaatccacaaaaaaaaaggatacaacacaaacacaaaacccttctttttgtattatatataaatttacaaaagagactctttcctgtctctcaagcgaatttaggcttcggcaaggctgagccaccaaggccgctgctgctgctgccaccgcctcctcctgcgtggactggtccaagcttctggatccagtgtttcagacctttccttgggtccttacagatcttgctcgaagacagattcaggttcccttcacgttccagtgatatcgcaaactgttcaagcactttcactatctgccagaactcgggtctcttatctggtgcaaccgaccaacactgctctatcagagctttcatggctactggac

SEQ ID NO: 221 - DNA, 510 bp, Arabidopsis thaliana
gaatcatggcgttgagcaccagcatcagatctgtctctaagatcatttcttcttctgaagcatcagtctccagatctgtgactagaagcttccactcgactggagttaagaagatgagcggaggaggacatggtggttacgatgaatactacctccacgcaaaacacatgtacaatttggaccgcatgaagtaccaagctcaagatgtctctcggtgtcttcaccgctttcagcatcggtgttggggttcctatcttcgcagtcgttttccagcagaggaagacccaatctggttaagtccctcaggatgctcttgttcacagcttgaataatttgtatgatttctcaaactctgcttttgcaagagagtttctttctccctttggatcttggccacaagtcttatcgttatgggaaagtgttctgtttcttcctcttttactggctgtttgatgctgcaataatgataatctgacagatatattttttaaaaaaaaaaaaaaaaaaaaa

SEQ ID NO: 222 - DNA, 510 bp, Arabidopsis thaliana
ccacgcgtccgcaaatcttaaaactttctggaaaaacaaaaatgtcaggaagaggaaaaggaggaaaagggttaggcaaaggaggagcaaagagacacagaaaggttctaagagacaacattcaaggaatcacaaagccagcgattcgtcgtcttgctcgtagaggaggtgtgaagagaatcagtggattgatctatgaagaaacgagaggtgtgttgaagatttttctggagaatgtgattagagatgctgttacttacactgagcatgcgaggaggaagacggtgactgctatggatgttgtttatgccttgaagagacaaggaagaactctatatggatttggtggttgatcaatttgagatctgggttttctggtgaatgatgataatttaagtcttgcgatcaagaaattccagaaattgggttgaattttagggtttcgttttgtgttgtaattagggcagcattgtaatggattaatgataagtaccatttgctctaaaaaaa

SEQ ID NO: 223 - DNA, 510 bp, Arabidopsis thaliana
ccacgcgtccgaaacagataaagcatgcgttttcccgtaaaggatccatgaaaccaagagatgggcataaagaaatcgttcctgaatctgattctggaactgattctgaatcttctgatgatgatgatgcgtttacctgtgtaaagaacctggcaacagaaccaggaaaacttacacgcgatgggaatattgaaagaacaggagatgatgatcatgtagattcaacaacattagcaaccgctaaggaagattcaagtggtgatatattagaggattcgacagatgttgaagctaaagaggagaaattaaaggaagcagcagagtcagaaactagagatatggacaccgccatgaacatcaaaactgaagatgagaaaggagagacgcttaaaaatatcgaaggaggggaagaaaaggaatcatcttcaaagtaaaaacgtatatcatatgcacattaacgttcatgtatatgtttctgtgtttactgaattcgaaacctgcgaatcaaat

SEQ ID NO: 224 - DNA, 510 bp, Arabidopsis thaliana
aagaaataaactaagtaaagtcgaattcaagaaataaactaagtcaaaatcgcatacaacaaaacctcgtaatataatagtataatgtctgagcaaaacttgcaaaaacattcaaatacgataaactgattgaattcagtacttgacgggtgcaagaacatccaattgagatccaagcttctcttcagcaaccttctcggccttagctctgagtttgctaagttgcttctttctctcataaacagcttgagctctttcctttctcttgttctccagctccttgatggtgtcgtagtggttccacccgacttcagaagaaaggcgacccaacagacagtatttgtgtccagcctgcagcctcaagaccttgagagcatcaggaacgaccatcctcttgatcttgtcatatggagtaggaactccttcaaagaccttcaagcgggcaagtgcattagctccacgcttagtcttgtgtggaatcataccgcgaacggtacctcggccgcgacc

SEQ ID NO: 225 - DNA, 510 bp, Arabidopsis thaliana
ttttttttttttttttttttttttgtcctttgcttattttcattacaattcattgactttttattttgctgtcactttggcatttgcttgttttgattacaaaccaataaaaatagttaaacatgaaacatatgaaattgatgcaaaagatggaaagataaaataagtcaattcacttagcccatccataagacacacctgatgcatttcccttcaagaagtagctggaatgcgtcgttgatctcctcgaatttcatctcatgtgtcacaaacttatccaattcaagttcattgctcaagtagcgtttaagaagaattggaatgtgtgttttagcctttaaacctccaaacaacgaacccatcagaatcttcccatggtgaagaacatcaaacgaatctaaacatatttgtgaacccggcttgtccacccctaaagttattgtctttccccatccctgtctacagcaagcataagcttcttgaaccaaagaactacttccaacacattcg

SEQ ID NO: 226 - DNA, 510 bp, Arabidopsis thaliana
ggaatagctcgtcttgtcatatcatatcatcattcagacatgcaacgaataaatacatatccgtgctcaatcctctaaaacagaggagtgcttacaacaacaacaactccagaaacttaactagcaacatttgatagacagaaaaagtagcaagaaattagaagctccgagtcttatgttttaggaggaaacgcctgctccgccccacccttgtttgttccttcctcttccattttcacacttgcttcctccactcccactgggtttactcctgtaaccttagtgcttccactctcatccacctccacctcacaaccttttccacgctccataattcctttcagtccatccttgtcctttgtatctggttcaacagcttctctttttactctgcttggtataggtttacggtcatcatcaacatccatgtctgaatccggatcccatcttttatccccatcttcttggtcttcatcaacctcgggagtctctgtatcaggtggtctttcc

SEQ ID NO: 227 - DNA, 510 bp, Arabidopsis thaliana
ctactgggaatggagtctctgagtcaggctctagactggtcactgaatcctcattgtcacctcttcccctatctcaaacagctgatcttgcaacatcatctgctggtcctttgttaaggaaagatcagaagccccggaaacgttcagcttcagatttgctaagattgatcccatccctccaggtagtggaaggtgttgctagtcccaataagagaagaaaaacctctgaactggtacagagtgaattagtgaagagttggagccctgcatcacagaccttatccactgccgtgtcaacatcaacaaaaactataggatgcagctatgggaatctcatagctgaagcaaacaaggggaatgcaccttcaagcgtttttgtttatgctcttctccatgtggtcaggcattcttcgttgtccataaagcatgccaaactaactagtcagatggaggcattggatattcaatatgttgaggaaatgggactaagagatgcattttcagatatat

SEQ ID NO: 228 - DNA, 510 bp, Arabidopsis thaliana
ccttcttcttctgcttcctcttcaaactccttgacttacatcgtccacgtcgaccacgaagctaaaccctcaatcttccccactcattttcactggtacacttcctctcttgcctcactcacctcttctcctccctccattatccacacatacgacaccgttttccatggcttctccgctagactcacttcacaagacgctagtcaactcttagaccatcctcatgtcatctctgttatcccggaacaagtccgtcacttgcacaccactcgttcccctgagtttcttggtcttaggtccaccgacaaagcgggtctactcgaagagtctgatttcgggtcggatctagttatcggagttatcgatactggtgtttggcccgaaagacctagctttgatgaccgtggtcttggtcctgttcccattaaatggaaaggccaatgtatcgcttcccaagattttccggagtctgcttgtaaccgtaaactcgtcggagctagattcttctgc

SEQ ID NO: 229 - DNA, 510 bp, Arabidopsis thaliana
  misc_feature (1)...(510): n = A,T,C or G
ccacgcgtccgaagttggtttcgagtaactcacagactacgggagatacttcgagtttggaagctgctgatgtatatgttgttgattcggaaatacagacaaacccggttactcataagcagagatctgtttctccttcgcctcagatggctgttcccgatgtgtttaaggaagcgaggtctgagcgtaagatattttctactccacatccaagaagagtggaatcggaaaagggaatgaagccnnnnnnatctcataaaaactcctttgacaagagatcatttaacttgcggtctccttcaggtcctatcagagatcttggcactttgagaattcaagagagggtcaagagcaagaaggacactggatggtctaagctttttgataatactggtcgtagagtgagtgctgtggaagcttctgaagagttccgtgttgatatgtcaaagctgttctttgggcttaagtttgctcatggtttatacagccggctatatcatggtaagtatg

SEQ ID NO: 230 - DNA, 510 bp, Arabidopsis thaliana
cggccgcttttaagcatataaactcatacatctcttcatttgattctccaaaagaataatcatatagagatttgtctctgtaactatctacttagttagactgcgaacgatcttttggtttagacaaactaagcttcttctaggcaatggcgacattcataaattgaaaataaagaaagggttctaagtttttattgtttttatcttccttggactagaccactaaagacttggctgtttccagcaagagtggcttcccattcaatggaagacaggagtatctgcgagagcgatataaccacttgcttcatgtttggtcttagaatcggatcatcatccacacattgctttgccaacgtagcaatcttgaacaaacagtcatgcgggtataaatccatcatgttggggtcaacaaactccttcaaactcgacatgttcatagagtctggtgagttctttagcactgctaacataatagatgccaatggacgtctttctggattcttagtt

SEQ ID NO: 231 - DNA, 509 bp, Arabidopsis thaliana
  misc_feature (1)...(509): n = A,T,C or G
tttttttatcacgaaatggaatactaataactaaaaaatcaagccatttacttacatttgttgtatatgctttnnntttttccttcaaccccattttacaggaaagtgtatataataaaatgattataaaaccacttaggtgaaaagattattgttaatgtccataggtgaagatgttttgttcaacacaatctcgaactcacttgtctcattgtctccttctccctcttcttcttcatcgtattcatcttcttcactctctccttcttcttcatcttctttatcaccaactttttccctctgatcagtctcaaactcggtctgggtttcttgcaagagaagcaactgtctctgtggagtcaccattagaggcaatggcaatggcattgccccacttttgttcctctcgttgtacaaagcttcgagctggtgaaaataagggcaagtcttggaatcaaggggacgtttcttgttgctttctttgactttcttaaagtacttgttgatgt

SEQ ID NO: 232 - DNA, 509 bp, Arabidopsis thaliana
  misc_feature (1)...(509): n = A,T,C or G
cataagcccatagttggagcgaactgttttgttcatgagagcggcattcatcaggatggaatatnnnaaaataggagtacttatgagatcttatcaccagaagatattgggattgtaaaatctcaaaattccggccttgttcttggaaagcttagtggacgtcacgctgtgaaagatcggctgaaagagttgggatatgaactcgatgatgagaaattgaacgctgtcttctcactattcagagatttaaccaagaataaaaagagaatcacggatgctgatttgaaggcattagtaacatctagcgatgaaatctctttggagaaattaaacggcgctaacggtttaaagtctaacggctatataccagttcctcaggtttcatcgaatgtgtaaacacgttgtatctcttgtatatttgtgtaccacagtaatatcaatttccatttgataatgccgtttttgttgtaatgtattaaaaacagtattaaataaaaggaactgcttta

SEQ ID NO: 233 - DNA, 509 bp, Arabidopsis thaliana
atttaatacaccatatttttaaaaatatgaaatcctgcacgtatgtcgggtctaattaaagcgcgaatgacatttgtagcggataaaacagaacaagtagttcacgtgattttcccgaaggaagcccctatggagaagctgagtttccatctcactctgtatcgtgatagtaggaacgaatcgcataagcggcttgcgtcatggtaagaagaataacgaaaacaacagcaaaggatgacagagcagtccatggtgactcaaagtgcgtgtgcctaaagccagcccatactccattgtacgttttggaggtgtactcgttaactccctcaaacacattccgtaagtaacttctacgtgtgtcaaatacaacatctttacatatagttttgaaaaactgtgatacctcattctcgttgccaaagtagttctctatgatccgcttgtcgttgttcaagaaagtagcatcttcctgatcgtttagaagacatcccatgaaaaccacgtagctt

SEQ ID NO: 234 - DNA, 509 bp, Arabidopsis thaliana
cttacgaacatagcaaaatccaaatcaaattcctgaagaaacctctttcgctctcgtcttcgttttcagatcaacaagaaatggcaacagcaacatcagcttctctgttttcaactgtttcttcatcttactccaaagctagctccataccacattcaagactccaatctgtgaaatttaactcagtccctagcttcaccggtctcaaatcaacctctctcatctccggatctgattcctcttccttaaccaagactctccgcggttccgtaacgaatgcacaaacatctgacaagaagccttacggattcaaaatcaacgcttcgtacaaagtagctgttcttggtgctgctggtggtataggtcagcctttatcacttctcatcaagatgtctccgttagtctctacgcttcatctttacgatatcgccaatgttaaaggagttgctgctgatctaagtcattgtaacactccttctcaagttcgtgatttcactggtccttctgag

SEQ ID NO: 235 - DNA, 509 bp, Arabidopsis thaliana
cttcttctgcgatcaactaagatccgatccgcgagcgtttcagacttcgatcagatccgattaagagaagcaaatcgggtcgggtatgactcgtcgatgttctcactgcaatcacaatggccacaactctcggacttgtcccaatcgcggcgtgaagctctttggtgttcggctcaccgaaggttcgatccggaaaagtgcaagtatgggtaatcttagccattacacgggttctggatcgggtgggcatggaaccgggtccaacactccgggttctccgggtgatgtccctgaccatgtcgctggtgatggttacgcttctgaggatttcgttgctggctcttcctctagccgcgagagaaagaaaggaactccatggacagaggaagaacacaggatgttcttattaggtttacagaagctgggtaaaggtgattggagaggtatctcaagaaactatgtgaccactaggacacctacacaagttgctagccatgctcagaagtatt

SEQ ID NO: 236 - DNA, 509 bp, Arabidopsis thaliana
  misc_feature (1)...(509): n = A,T,C or G
ccacgcgtccggattccctcgtccactccagtactcgtcgtccgacccaagtctccttaactttatcacagcgactgctattttacgagcagagacatttgggatcccgatacctgagtggactaagaacccaaaggaagcagcagaagctgttgacagagtgatagtcccagactttgagccaaggcaagatgcaaagattgtgactgatgagaaagctaccactttaaccactgcttcggtggacgacgctgcagtcatcgacgatctcattgctaagatcgaccagtgtaggcataacttgtcgccagacttcaggatgaaacctattcagttcgaaaaggatgatgatacaaactatcacatggatgtgatagcaggactagccaacatgagggcgagaaattacagcatccctgaagtggacaagctgaaagcaaagttcatagcnnggagaatcatcccagccattgcgacttcaacagccatggctactgggctggtctgcc

SEQ ID NO: 237 - DNA, 509 bp, Arabidopsis thaliana
  misc_feature (1)...(509): n = A,T,C or G
ttcatcacaagtctccgaaactagctctattcgcaacaaacatcacaaattcggagttcgacagagctaaatccgcaggatttgcagatacggtaataatgaaaccgttaagagcaagcatgattggggcgtgtctgcaacaagttctcgagctgagaaaaacaagacaacaacatccagaaggatcatcacccgcaactctcaagagcttgcttacagggaagaagattcttgtggttgatgataatatagttaacaggagagtagctgcaggagctctcaagaaatttggagcagaagtggtttgtgcagagagtggtcaagttgctttgggtttgcttcagattccacacactttcgatgcttgcttcatggatattcaaatgccacagatggacggatttgaagcaactcgtcagataagaatgatggagannnnagctaaagagaagacgaatctcgaatggcatttaccgattctagcgatgactgcggatgtgatacacgcg

SEQ ID NO: 238 - DNA, 509 bp, Arabidopsis thaliana
ccacgcgtccgcaaactcatattttctattttctgtctagttattatactatccgcctgtaattcaacggcggagctaccgcggttcgtccaaccaccagaacccgatggttcactcagttttctcgttgtcggcgactggggaagaagaggttcttataatcagtcccaagtagctcttcagatgggaaaaatagggaaggacttaaatattgatttcctcatttcgactggagataacttttatgatgatggaataatcagtccatatgattctcaatttcaagattcgtttaccaatatttacacagcaactagcttacaaaaaccatggtacaatgtattaggaaatcatgattatagaggtaacgtctatgcgcaactcagccccatactcagggatttggactgccgttggatttgtttaagatcttatgttgttaacgccgagattgtcgatattttcttcgtggatacaacaccgttcgtagatagatattttgatgaacc

SEQ ID NO: 239 - DNA, 509 bp, Arabidopsis thaliana
gcggccgccgacaatgctcatacacagatatactacactcaacctatgggacatgcacagtaccagacaatgactgggcctccacctgccatggtgatgcctgatggttctgctgctgctaagcttccagctgagaacatgactcaacagatccggagttcacagccattgtgacacacacaaggaacacatgaagatgaaccacaaaattttggaggaagaaaaccccgggttggtttttaaacgtataaatatataacttttacttcttttttcttctcttcttttacaagttgctgcatcaaaaaaagagtctggtgtcatgttaagtttggtattatgggttgtgtttaaaagtgttgtgtgagtaaattaaaaaaacaaataaatagtgcttcttggtgggattttacattatatagttgcaattgatacatgtagtgctttaccattttcctggatcttatatcatattattatcattcatttcattttgtaagcggccgcga

SEQ ID NO: 240 - DNA, 509 bp, Arabidopsis thaliana
tttttttttttttttttttttttttttttttttttttttttttaaagaaaagacgaggcttaagattttattaaaaaaacattttacactttattaaacaaacaaaacacattatacgtatacagatttagagtatagcactttaaaaacatacaacatgactctcatatatccaacacaactctttatttttccacattcaaagagtgataaaaatcggcatgcttcaatcacacatacatgtacggacaggataatagatagtcacacgaggaatattctcctctattcctcggccaagagatgttcgtcgatttctttggagacttcgacggcaaactggaggagagtctcaggatgagccacctcctcgtttattttctcatactcgaagtgccaatgcaccacactccctgaacctccatgcttaggagtcacttggattgtgattacgaagctcttgtactctttcatcagatcaccttctataaccctgaacgtgatcaagt

SEQ ID NO: 241 - DNA, 509 bp, Arabidopsis thaliana
  misc_feature (1)...(509): n = A,T,C or G
ccacgcgtccgcaaattttccgatcttaatcggatttcaatccggcggtcatgccggttttagcttgtttatagtttatgtttcagtttgttacttctcttttgctttccgatttagatcaaaactctcacatatgattctgaaacttaattttattgtctgatgagtttttgatctagattcggataataaattccttcttaatccggtttgttcctgattaagtcggattgtgtgtttttgttcttccttctccagagagtataactttgatcccgattgcaaccggcagatctcctttgattctccatctgctcaacccctctcttcaagctggagtaatttcttcgtcgttatgcttcttatgaagtagaccttcttaggtctcnnggcggagcttcctcttggagtcagaattgagaagtttgaagattgaagatcttcctgaggttattcatggtgggagtgaaggattttgatcggacctgcaacggatagatctttggaag

SEQ ID NO: 242 - DNA, 509 bp, Arabidopsis thaliana
cctttgcgtgacagggaatctctccgttggggttttgtggctgcctacgatttctgcaagcaaaaccacagaactcaatctaattaattagccgagtcgactcaatccgagtttctacagccgcacgagggaatcatgaatcggctgagaggccgaggtacaccgattctgggttccgcactcgtgcctcagctgaagaaaaaagccctaaattcattggtcgccgtccaggattcatatctatccaccaaggacttgttcgagaggcacagggtcgtgtttacagttggaacttctatagcatctgttgctacggcttggattggttactcattacgacattacaatgaaactagaattaatcagaggctggagtccattgagaatgcgatgaaaaacacccaagagttagaacgaggagaactgaagaagctcgttgatccagtcggttccaggttcactacaacaattgccacagcgggaaccactttgatcctcgggtatgggtt

SEQ ID NO: 243 - DNA, 509 bp, Arabidopsis thaliana
aaatcttacaagaagatcatttttagaaaccctattaggataaaatggattacgaggcatcaagaatcgtcgaaatggtagaagatgaagaacatatagatctaccaccaggattcagatttcaccctactgatgaagaactcataactcactacctcaaaccaaaggttttcaacactttcttctctgctactgccattggtgaagttgatctcaacaagatcgagccttgggacttaccatggaaggctaagatgggagaaaaagaatggtattttttctgtgtgagagaccggaaatacccaaccggtttaaggacgaaccgggcgacagaagccggttattggaaagccacaggtaaagacaaagagatattcaagggaaaatcacttgtgggtatgaagaaaactttggttttctataaaggaagagctcctaaaggagttaaaaccaattgggttatgcatgaatatcgtttagaaggcaaatattctattgaaaatcttccc

SEQ ID NO: 244 - DNA, 509 bp, Arabidopsis thaliana
gcgtccttggtagcagctcctatctctttctcaggtgactctcatgtcaaagcacaccgaaacttcaatgcgattcgcaagagctctacattgactgttcaaacaaaatcaaaccgcagtcacaaactctcggtttctgcaggttaccgtgggggaagtaagggtggtggaagtagtgattttgttaccggttttcttctaggaagtgctgtgttcggaactctggcttatatctttgctccacagatccgaagatcagtgctgagcgagaatgaatatggtttcaagaaaccggagcagccgatgtactatgacgaaggcctagaggagagaagagagatattgaatgagaaaatcggccaactcaattccgccattgacaaggtttcgtcgcgtctgaaaggaggtcgaagcggtagcagcaagaacacttcttcgccgtctgtcccagttgaaaccgacgcagaagcagaagctactgcatgattgaatgtaatgctctgctccat

SEQ ID NO: 245 - DNA, 509 bp, Arabidopsis thaliana
aaagagttactatgttgttgcaatgttcctctcttgatgattctcttccttaacaccagccaataaccctaactcaacatgctgatccttaatcctgctcataacccttgacagatcttcctcataaccaacaccaaacgatgaagacatcgtgtcctgtcttcttcctcgagaccgactttgtttgatctttagtatgaactgtgttacttctccaatagatggtctttttcttggtgtcttatgcacacacctgtttgcaatcttcgccagtaacctcacttcttcaatgcttgcgtttcccactagtttctgatcgagtatttcgtcgataccatctggactcatcgaagccaggttgatgtattccatcagattctgttggggatggattgcagtaatgagctcaagaatgatgacaccgaaactgtaaatgtcgctcttcatcgtgtatttgttagtcgaaatgtatgttggatccatgtagccgtgagtacccttcaatccgg

SEQ ID NO: 246 - DNA, 509 bp, Arabidopsis thaliana
aatattttatatgtattttgcattatataacactaacatattacatcaaagtttatagtgatatcactgattaaaattaaatgattatagatatgtatatgaacaatatgaatcatgcaggatgtaatgctgatatggggtgagcaagatcaagtttttcctttaaaaatggcccatgacctcaaagagtaagacccttgattatattctttctatttgatctaactaaagttaatcgggtaaccaatacctatgctacaaataccaagagtgcgatttgagaacgaattttggaattggtatagtaacgagttattcatattcgtgtgtttgtttgtatatttaccaggatgttggggactaaggcgacgctaaaagttatacaaaagacatcacatatacctcaaacggagaagtccaaagaattcaatggctttgtcatgtctttcttattacctccttctccatcaccataaatgtaacatccatattaaactataaattacaat

SEQ ID NO: 247 - DNA, 509 bp, Arabidopsis thaliana
tggatctgttgtactcgtatagagaaaaaatggcgtatcctgagagatctctcattgttgatcctagaagtggtttctgcaaatcaaactctacattctatagcaagcgccaaccattaagtctcccgccaaatctttcgcgtgacgtcaccacattcatctcctctcagccacaccgtggcaaaaccgcctttatcgacgctgccacaggccagtgcttaaccttctccgatctctggagagccgtcgatcgcgtcgccgactgtctatatcatgaagtcggaatacgaagaggcgacgtcgtcctcatcctttctccaaactccatcttcattcccgttgtttgcctctccgtcatgtctctcggcgccgttttcaccaccgccaacactctcaatacttccggtgaaatctccaaacagattgccgacagtaatccaactctcgtcttcactacgcgccagctggcaccaaaactccccgtcgctatctccgtcgttctcaccgac

SEQ ID NO: 248 - DNA, 508 bp, Arabidopsis thaliana
gacttgaatagagagagtaagctaggtacacacactcgctcaaacaaaacataacttacggtaacaaattattcattccattccgtacatacgatattaactacgacgaaccaaaaacataaaacatacttattgtttcacactttaagtcgaaaagtaattattataatttagttaccagatcctgatccagctctagagccagcaaatgaaccggcagatgaaccagctgaaccacccgaaccactagaactcgaacttgatgatgagctggagctagatgatgatctggaacctgaacctgatccagaacctgcaccagcaccggagcccgacccgccgccaagaccaatccccaatccaacgcccaaaccgattccaatcccacctaggtcaatccccaagtcttttcttgcgagtcggctctcggttaacataactaaacttgaaataactactaaaccaagaagaaaaagaccttcggccttagccattttggaaatcttcg

SEQ ID NO: 249 - DNA, 508 bp, Arabidopsis thaliana
agaaacgctcagattcgacagttctatatatcaacaaacatcatctcaagctcttacctgatatctctgttttgatggatcaaagtcgggttttgcggtttataggccaagtggaaacctgtagagttgttcttctcatggttctggttgttgccttcgtttcaggccttcagtattttgagctctctccagtactactatctattgtttcacctggaaacagcactatttctgaattcagaaaatccaatgatacgactaaaagtgctgaaaatgaaacgtttcttgcatctcaagaagcatccaccgggcttaaaccgtataacagaactacagaggtattgaagagttctgagcacaagtttctgaatgattctcacaaaatagaagcttctggacaacgtagaagaagcaatgaaactgcaagttctctgcatcctcttcaaccaaagattcctcaaatccgcaagaaatatccccataggagcataacaaagccaccatcaat

SEQ ID NO: 250 - DNA, 508 bp, Arabidopsis thaliana
  misc_feature (1)...(508): n = A,T,C or G
tgtctctcttatctcttcttgttttagctatgaagaagcaatctcaattcagatccagtcacacacttctcttctttcttctctgatcatcaacaacaacgattcgggttctgtaattttactaattggagagaaaatggcgatgttagttgagccaccaaatgggattaagcaacaagggaaacattactactctatgtggcaaacattgttcgaaatcgatactaagtatgttccgattaaacccattggaagaggagcttatggtgtggtttgttcttctatcaatcgtgagactaatgagagagttgctattaaaaagattcacaatgtgtttgagaatcgtgttgatgctttgagaacgttgagggaacttaagcttcttnnncatgtgaggcatgagaatgtgatcgcgcttaaagatgttatgttgcctgctaatagatccagtttcaaggatgtttatttggtttatgagctaatggatactgatcttcatcagattatt

SEQ ID NO: 251 - DNA, 508 bp, Arabidopsis thaliana
agagagagatctttgaaagcaagaaattctaatccatggaatcatctccttcgttccttgacaatctcttcttcttcttcctcatacgtccgcttctggcgatctcattcgtcatctgcttcatcgctctttggtggtttctagcatggaagcttgtattaagccatgttcctctagtacaagagatctttggcttgaggaagaaaacctttataccaaaacctgaatctcgtggtcgaatcgccaaattctacaaaagtatcagttctcagaatcctgttccccaatgaaatcgcaagctccgaggtttatagaagcttcgatgatccgaaaaccgaacgagtaagaggatattcaatgtcacaatccagaaagattcaagttacagttttagtcactaaaagagttctgttatgttgttgactcttttatggtgggggatgtgtgcaatgtagtgtaacaacttgtgtagtgtgaagtatttcaagcccaaaaaaaaaaaaaaaaa

SEQ ID NO: 252 - DNA, 508 bp, Arabidopsis thaliana
ctttttttttttttttttagagaaatcaagagcttctaatacatttctcaaatggttttatccttaaaaaaacatcttttggacacaagtacaagtgttccaaactttaaaaaacagagctaagagaaataaagagagagattaaacatctttctttgtcttcgacttttgagggactttcttttctctctctaatgcattggaccaggaccaccataatgctgtggaggcatatgaccacccggaccttgatgcattgagcttgaagatggtggtgccatgtaatgattgtgaccaccaccacccattcccatagagccttgccctcctggttggacccatccaccttgtggctgctgctgctgctggtggtggctcccacctgctgcgtggtattgctgtggattgccggcgtatggattctgaacgggttgttgaggcattggaaccggtgggttgggcattgtgtagtctctgcttctatcgttgttcacctttatgctgaggt

SEQ ID NO: 253 - DNA, 508 bp, Arabidopsis thaliana
gatggtaaaacattagcggattacaacattcagaaagaatcgactcttcacttggtattgaggcttaggggtgggactatgattaaggtgaagactctcacagggaaggaaattgagattgatatcgaaccaaccgatactattgatcggattaaggaacgtgttgaggagaaagaaggtatccctcctgttcaacaaaggctaatctacgccggaaaacagctagctgatgacaaaacggcaaaggactacaacatagagggaggctctgttcttcatctggttcttgcccttaggggtggttttggtcttctctgagaagtaactcttgaagatatctttttctctttgtatggcttgttggagttcatgggaaaaaagtgattgcaatttggatatgatactttgaatattatgctgtttcactgggtttggatcattttaccaataatctgttaaatatcgaatcattttgttttgtttaacatcgaatcgtactttgcggccg

SEQ ID NO: 254 - DNA, 508 bp, Arabidopsis thaliana
  misc_feature (1)...(508): n = A,T,C or G
agaaagtatttaccagttcaattcaaatgaagaaaagaaattacaaatcgtgtcaacaagaaccgaaatnnnttttttttttcgtttccttctgtttttaaaatgaacaatttgaaacagagatttatttaagttaaagcaagtgcagttcttcttctactacttctaattaccatcatgaaggagaagaagaagaagaatgtggtaatggagaagtgctttagtataaacggaacttctcctttgtgttctggaaaacttgctccgcaatcgcagcgccattcccgtctgctttcttgatctccagactagatttctggtaaacccccgtgcctctcaaagcatcagctatgaagtcatcaaacccgatggctatagctgcttcggctttgnctccataaaccaacctcttgagtctcgagagatggatggctccgaagcacatcggacatggctcacaagatgcgtaaatctcgcattctgataactcgattttgttaagtttctt

SEQ ID NO: 255 - DNA, 508 bp, Arabidopsis thaliana
cctctagagcggccgcccttttttttttttttttttatcatctaggaatattggtaaaatattctcatataacatacaaacataatattttcaccaaaaaaaaaagaaaacatacaaacataattagttatctagtgtatacatagccattactaaaagactaaacgtcaagcggactagttgaagattttaacaacagagggacgtgctctgcacatggcttccaaaggcttggctttaggcattgtaacacctttgccttcactcatatccacttcttctccaatcttctcccattccaaacactgaatcaatgatccaagagtcaggtttataagccggtgagccagtccagaaccaggacacgcccttcttcctaacccaaacggcataagcttctgagcttctccttccttctcaaacctctctggcttgaagctcattggatcatcccatagctgaggatctctgtgtatagcccacacattggtcaatagtatcgtgccac

SEQ ID NO: 256 - DNA, 508 bp, Arabidopsis thaliana
gttctttcaaatccataaaaatatacctggaatcttgtttctatacttcttctgtttctcatactctctactaatactaacatttttccagaattttgttaaaccctacaaaaatttgaactttttaaaaccctagaaaattccaaattcgtaaaaccctagccaagttcctctattgcgtgaggggaactcatcagaacccacgaatcgaaatgaagaatccagaaaaacccttacttctgtttctaattttagcttcaagcttagcatcaatggcgactgcaaaatccacaatagagccttgctccagtaaagacacttgtaactcattgctaggctacactctctacaccgacctcaaagtcacagaagtcgcttctctcttccaagtagacccagtttcaatgcttttgtctaactccattgatatctcttacccagacgtcgagaaccatgtccttcccgctaagctcttcctcaagatcccaatcacttgctcctgtgtcga

SEQ ID NO: 257 - DNA, 508 bp, Arabidopsis thaliana
caggcgggtcaggctgccggcaagaaagtaccgtcctggcgagaatggtccaaaggttccatttttcactgatgacgaagagagctcaagtacaccaaaggcggatgctcttttcattccaagggagaaccctagagctctagttatacgcccagttcaacagtggtcttcaagggataaatcaatacttccaaaggaacaacgcccgactgctccattacatgacaatgggaagagtcccgacatggccactgatgcagcaaaccatgacagaaatggtaacggagaacttggtgctactggggaaagaattcatacatcagtcaatgcaaatcagaaaccgaatggcacaacacgctcagatcaggctagcgagaaagagcgtccctacaaaactctaagtggacacagagcaggagaagccgcaattgtttatgagcacggtgcagatatcgaggctcttatgccgaagctacgacaatctgattatttcacagagccacgtatc

SEQ ID NO: 258 - DNA, 508 bp, Arabidopsis thaliana
cttctgtctgtaaaaaacctatacgcctaagcttgagaagctaatctttacatgtaaagattttgtacaaaaagaaaaaaagagttaaaaatcatcagcacggtggatctcgcccataatgcgattgctagtgactttgaaaccaagaagagctggatcgatctgcctccctttcttccctttcttcttcccgccaccacctttgcttccttctgttacatcatttgactctgccgccaccttcttcatgctattactcttcttcaacatctcactgaacgatgtcgcctctgacgttgaccctttgtttcccgctgctcctgattcccgtctcacaccgccttcaattccactatacgaacttgctgctgtcctgctagctgtgtcagagatacgctctatcaatccttcatgcgatgatgaagaatgggatgagggaggcctttttaacaatactgaattctgtccatgtgatggaactaccaacctatccttccttctatcttct

SEQ ID NO: 259 - DNA, 508 bp, Arabidopsis thaliana
aaatgattacaaagatggtaaatgaagacttcaaagatttgaaaggtcaaaaaagaagaagaagaagaagaaaactacgaatctctatagtttgttgctcctcatcagacaaaatccaagaccaaacaaaagcatcatcatcaagctttacacatgcatggagtgagaggattttcccaaagatcatagttagggaaagtttcttcaggtaaaccggttcgtgtttgatgggttacaactacatcttccacaaaagttgcccatcccatgtaaggatccccaaatgatttcgacatcaaccctttatccggtttgattgatttctggcgatgccccatatatctacgcgctccgatgatcagttttgcaaagtttccaccgtgtgtcatcacaaatacatctgatttcaagcacaccaagaaatctagagccgcaagacttgtaacgtgttttctaaacgttgttagttcctctttgcctgctaaatcctcctttgttaccaaatttg

SEQ ID NO: 260 - DNA, 508 bp, Arabidopsis thaliana
taatcaaaaatctcttctttaggaagagaagtttcctccttcgactttcttctttctcaatatgaatcccggaaaatcgggaacctctagcgatttcagctaatctttacttaccttttctttagttctgacaagaagtagcaatacccttttggagattcgatcgtattcgctgttttttttttgtgttttagctgtcttcgtgtctctgctactttgtgtttgatcatggagagatctgattctagagatttctacaacttcgctaagacttcttctgataacaatagtgcactctttgacgcatctcaatatgagttctttggtcaaagtcttgaagaagtcgaattgggtggtcttgatgatgatggtactgttcgtggacatgttgatgatgaagagtatcacttgtttgataaaagagagggtgctggtttaggatcattatctgacatggatgatcttgccacaacttttgcaaagctgaacagaaatgttaccgggccca

SEQ ID NO: 261 - DNA, 508 bp, Arabidopsis thaliana
ctcgcctgagacatcatcatcacattaccaatcatctccaatggcaaaatacgccggaacaagaaccagaccggttgtatgtatctccgacgtcgttctcttccttggcggagctttcatgtcactaatcctcgtctggtctttcttctccttctcttcaatctccccaaatctcaccgtgaaaaacgaagaatcctccaacaaatgttcttcaggaatcgatatgagccaagatccaaccgacccggtttactacgacgacccggatctaacctacacaatcgaaaaaccggttaaaaactgggacgagaaacgaagacgttggttaaatctacacccttcgtttatccccggagctgagaatcgtacggttatggtaacaggatcacaatctgcgccgtgtaaaaacccaatcggagatcatttgttgcttcgattttttaagaacaaagttgattattgtcggatccatggtcatgatatattctatagtaacgctcttcttcat

SEQ ID NO: 262 - DNA, 507 bp, Arabidopsis thaliana
ttcgaacattttgatttaaaaaaaaaatgaatatcaccaaggcgtaattaacaggtaacaaagaatgtaacaatttcaggaactgataaagaaaataagaattgtagtgttttttcctctttctatcaatttattttcatcgtttctggtgtaaaacgtaaacccagtttcagaacagtcctttgtgctccatcagctcataactccgtcttcttctcctaattccctttttttggggggttcctgattattattattattccgataacagataaaataaaaacatgggctcgatcaatagacacgagctttgggagggaaagtgtcgatctcatcgtcgagagtgtccatgtgaacaggcctataatccaatctcactttctcatcttcccaatatcccaatgtatgcttcatccattctccatcctctcttttcgtgaagtcttcccgagcatgtgctcctctgctttcctttcgtgcttctgctgaatgcattgttatggatgc

SEQ ID NO: 263 - DNA, 507 bp, Arabidopsis thaliana
caggtactggtcaggcagggtatggagctcctccaacttctcaggctggttacagcagccagccagcagcagcttacaattctgggtatggagcaccaccacctgcttcaaagccaccgacttatggccagagccagcagtctccaggtgctcctgggagctatggtagtcagtctgggtatgcccaaccagcagcttcagggtatggacaacctccagcgtatgggtatggtcaagcgccacagggatatgggtcttatggaggatacacacaacctgctgctggtggaggttactcttcagacgggtctgctggagccactgctggtggtggtggtggtacaccagcttcacagagtgctgctccacctgctggaccgcccaaagcatccccgaaaagttgatatgtgtatggataaatttctactgttatacaaaacatgcttccatgctcttatctttttcttgaggatttatcaatgtttgtgtttcacattttagctcttg

SEQ ID NO: 264 - DNA, 507 bp, Arabidopsis thaliana
cgagcggccgcccgggcaggtacatgtggggactctgcgaagcatccatgggagtgtgttggagcaatgccttgagcataagtaatatgactcgttggtaatccactggtcctttttttagcagtcttaacaagtgaccgaaagctaaagctgagtgtttcgggaaccatttgttgcagagcagaggagagacacatgcaaggagattttcaactcttttaatctcgccacgagcatatgcgacaaaaacagtcgctaattcatcgagtgattttgcccgacaccagacagcaatgttagatgccacagaacatgccttttgatattgctgctggagtggtaacgcagaaaccatgacttggtcttgggtcagctgcaagcaaagccaaggaagtagacctgtgatatgcataaggagtcttgtctcagcatcgccaaatatagagtcacatgaaggcactgtaatccttgataggacctcaatagagaactcgtggctaacagtaa

SEQ ID NO: 265 - DNA, 507 bp, Arabidopsis thaliana
  misc_feature (1)...(507): n = A,T,C or G
cggccgctttctttaatcctagagcaaacaatcaaccataaaaaaaaaaaacatgtctaagaagcaaccattagaaagaccaaacctttgcttttctgaagatggaaatatctgaaaaatgcatgcatttgatgtattagcaaacttagagttcaaatgcatgcattttcaagacattttaaggcttgcatcccaaaagctccacctcctacctttggtttgaaagaagtcgagaagtttgtatacaacaaatggatgacaaagtcagtagtccctttgcatcactaggacttggggagagaataaagttgattcctcatcgaaattggctgaatttcctggattaagaatcagctcngcctaccacccttgaaagcagagaaaaagaacattatgccaaataccccttggataagaattttgctgccttgacattagatggattctctggatttttctcagctacgtccttgtcacctgtatccctcttcattagacgtgagattc

SEQ ID NO: 266 - DNA, 507 bp, Arabidopsis thaliana
tgtaaccattgttcgatctgagaaggtgaaggatgagattgttcttgacggtaacgacatcgagcttgtttcaaggtcatgcgctttgatcaaccaggtactctctctaactagctggtatcaaagagatttaggtgttatctagccaaatttgcattttcttgggactaaaaggttgagagattgtgttagataggtgacacggttcagttctaggaatcagattttgcataaatgaagtgaaaatcgatttgtattatctctataggtctctaatagacgattagattactcgctaagtaaactttgccaattttgcctattgtttggcttcttaagcttttcagcattgtgtatgaaagtgtttttttggttgatgtttgagtttaggatcacatttttgcatagtgaaatcaaaaggatcatttcagtgattgatttacgtgttcaagtctttgttgtaatcttttatgttgtgattgttgtgcagaaatgtcacgtgaagaa

SEQ ID NO: 267 - DNA, 507 bp, Arabidopsis thaliana
tgctaaggttcttttagagatgttcacggccaacaaaatggccaaagcattttttacaagcggtggatcagatgccaacgatacccaggtcaagctggtttggtattacaataacgcacttggaaggcccgagaagaaaaagtttatcgcgagaaagaaatcgtaccatggctccactctaatatcagcaagtttgtccggccttcccccgctacaccaaaattttgatttacctgcaccatttgtgttgcacacagattgccctcattattggcgttttcatcttccaggcgaaacggaagaggagttctcaaccagattagccaagaatttagaggatctaatcatcaaagaaggaccagaaactattggtgcttttatagctgaaccagtcatgggtgctgggggtgtgatacctccacctgctacctactttgaaaaggttcaagctgttgttaagaaatatgatatcttgttcattgctgatgaggtgatatgtgcatttgg

SEQ ID NO: 268 - DNA, 507 bp, Arabidopsis thaliana
acactcaacaacatatcccataacaaaaaaaagctattaaaaaaaaagagaagcagccatggaagaaggtaagcaagaagcttcaatgccactagttccaattgacagcttctcttacagttggttagttaactttccttctttagaagctaccattgatgatcatcatcaaacatacgaagattcatcttcttcttcttccttcattgagatggatccaagattgcctccttctagaagattcttcatcaaaacatctcatgaaagtagcttcaagttcgataacttcgtctctttctccgacgaagatcactctttagttcacgccgacgagctcttccgtgacggctacgttatgccttatcgattaaagcccacgtccgcggctaccgaggaagaatctgagccgttggatacaacaacatcggagaagattgatacacgtggccttaacagcaagccttctcctacttcttcaagaaagctgaggagagtgtccaaatgggt

SEQ ID NO: 269 - DNA, 507 bp, Arabidopsis thaliana
tcttgctcccaaagcaaaatcaactcttcttcttcttcttctcccagacatcagcaagattcaggagattaaaaccttaaattaaaacaatacaaactccaaattcaccggaggaaataacttaaaacttgaatctgaaaagatgagctgcaatggttgccgtgttctccggaaaggttgcagcgagaattgtatcctccggccatgtattcaatggattgaaaccgccgatgctcaaggccacgccaccgtcttcgtcgctaaattcttcggccgtgctggtctcatgtcctttatctccgctgttccggattctcaacgtcctgctttgtttcagtcgttgctctacgaagcttgtggaagaactgtcaatccagttaacggagcaatcggaatgttatggactggaaactggaatatctgtcaagcggctgttgaaacagtgcttcgcggcggttctttaagaccgatcccggagcttctcactcacggcggcggtttcgctgg

SEQ ID NO: 270 - DNA, 507 bp, Arabidopsis thaliana
tctctctcatatctctcacttcttctctttctttttaagtccccaaaataacctcgagatcgatggactcaaatctgttcataactcccacttcttctctcaaatcccaagccttggtctcttcatcatcctaactatataagaaaaagaaaaaacaacgtaaagtttctgccataaatcatgagaccaatattagacctcgaaattgaagcttcatcgggcagtagtagcagccaagtggcctcaaacttgtctccggttggggaagattacaaaccaatctcgctgaatcttagcctcagtttcaacaacaacaacaacaataatctggatcttgaatcatcgtctttgacgctgccactttcgagcacgagtgagagtagtaacccggagcagcagcagcaacaacaaccatctgtatcaaagagagtcttctcttgtaactactgccaaaggaagttctatagctctcaagcgctaggtggtcaccaaaacgctcacaaacgt

SEQ ID NO: 271 - DNA, 507 bp, Arabidopsis thaliana
gcggccgcacttatggttctcctttccacatggagcttctatacccgtggatggtggttttattggttaacttctacattgatgttgctgtcttatcagtttgggttgtctataaagaatctagtttgatcattggaattctatgggttgctctattgataggtcttggcagcgttggcacgagcgcagtcattgtcgtgcagctattccgtctgtctcctctcgacccgctctacctcgttctagtgaacaacagcaatcgggctggagatatgtacgagcgcactcattctgcggctttgcgcataatgtgaagctttgtcatttcatttttaacattttaccacaaaagttcaaaacatatttttatctacattttaagtttgtatgtttcatagttttcttctgtatatactttctcttatgtgacgacaattacttatgtacttaacttttttgggtcacgacttgaaaaaccacatatggattgagactttttggcggccg

SEQ ID NO: 272 - DNA, 507 bp, Arabidopsis thaliana
  misc_feature (1)...(507): n = A,T,C or G
tcacaaggagatagctgaaggtgggaaagaaaacaaggacattacaagcctacagtgtattgggaagaccctgacaattggagaggacaccttcgaggatctagatgaggtcatggatcgatatgttgatcctttggtatctcatcttaagacaatgctcaactatcggaaattccgtaaggggaccaaatcagaagtagatgatcttcttaggatcgannnnnnngaaaatccttcaagaatagtttattgttttgggatttcacacgaacatccaggcacttttattctgtcttacataaggagcacaaacccacatcatgagtatataggtttatatcccaagggatttaagttcaggaaaaggatgtttgaggacattgatcggcttgtggcatacttccagaggcatattgatgacccattgcaagaatcggcgccatcaatcaggtctattgctgccaaggtaccgatgagaagcccagcagaccatggatcatctggagg

SEQ ID NO: 273 - DNA, 507 bp, Arabidopsis thaliana
cttttttttttttttttttttgtgaaatcatgctccaagcaccaatgacattttctcttcagagttagagaattatgcaggcaaatcaaatgtctgatatatatacaaaggattattaccaaccacttaagggtgttaaagcaagagtaagtgttgataaaaataacttacagatgaaacagctactacttttcttggtcatagcaatgtgagccttgaccataagcagtgtgtcacaattgtttgcatatatacatgcttcaaatcacttgagcagattctccctcaaaggaacttagagcgctgataaccgattcatatacttctattcctttcatgaatacagtatcctttaggaactcgttatggtcatgcaataaaataggcgtattggtcattggagagaacccaaaagttggaattcccaaagtgcgaataaagcgtgaatctgtagttgaagccaaaatttcaggctttgcgagttttcctcccgttgcttcaacagct

SEQ ID NO: 274 - DNA, 507 bp, Arabidopsis thaliana
ctttaattataactttccaaagtaactagagtaagatatattctacacataaatttatgacaccaagacagaagaacgaacagacagatacacacaacaaaagtaaaaaagtgaacaaataaaacaatgaaaaataatttaaattctgtgttttttttaaccctcaaaacaggtaaatatttgctcgcttctcaacagttgattccacattccagaatgtccgggccagtgactcggctagtgaagggatcaatcctaacccacaacaacgagaagatagaagccaagagaacagaccagaccacaacaatggtaggagtccggttctgtcgacccatcaaacccttgaggaaagggtacaagtgaacaatcacccagaaggcaaagaacaacttaccaaagagtggtccccatgattggtatccactgttgatagcataagagactcctgcaacaactcccactaagtttacaatgagcagcgtcgttggcggaatcagaagtgtt

SEQ ID NO: 275 - DNA, 507 bp, Arabidopsis thaliana
caacaaagacttttgtgcaataaagcatggaatccaacagaggtcaaggttcgatccaacagttgcttgctgctgaggtagaagctcaacacattgtcaatgctgcaaggaccgcaaaaatggcaagactgaagcaagctaaggaagaggcagagaaagagattgccgaatacaaagctcaaacagagcaagacttccagaggaaacttgaggagacaagcggagactctggtgcgaatgtgaagaggctggagcaagagactgataccaaaatcgagcagttgaagaacgaagcatcgaggatttccaaagatgttgtcgaaatgcttctgaaacatgtgaccacagtgaagaactgagagatatttttataagaaagtaaaaaaaaagtttatgaaaaaagtgggagtcatttttgagtgatctgctctctttctcttttgtgggtatttctggatttgagagactcatcttatattattgttgctacttaaaaaaaaaaaaaaa

SEQ ID NO: 276 - DNA, 507 bp, Arabidopsis thaliana
  misc_feature (1)...(507): n = A,T,C or G
ccacgcgtccgggaagtttgcgacgaacttgcaaaggaaataggagaagannnngctgagattgaagcattgaagagagaatccatgagcctcagagaagaagtggacgatgaaagaagaatgctacagatggctgaggtctggcgtgaggaacgtgtccagatgaagcttattgatgccaaagtagcactcgaggaaaggtactcacaaatgaacaagcttgtaggagatttggaatctttccttaggtcacgagatatcgtgacagatgtcaaagaggtgagagaagctgagttattaagagaaaccgcagcatcagttaatatccaagaaatcaaggaatttacgtatgtgcctgcaaacccggatgatatctacgcggtgtttgaagaaatgaatctcggtgaagcccatgatagagaaatggagaaatctgttgcttacagtccaatcagccacgattctaaagttcacacggtaagtctagatgccaatatgatgaacaag

SEQ ID NO: 277 - DNA, 507 bp, Arabidopsis thaliana
cggccgcgcggccgcgtttcagtctaaatttaacacaaacaatttgttgtcccaaaatcaaagacttagaaaacaaaatgagagacataaacggatgaccagcgtgtacattttgacgaacttggaacggctccaacaaaaaaaaacagtcgccgaaacaagaaaccgaagatggtaaataaataccccaacaccttaagacccatttcttcaaacccaagaaacaatggtgctcttgaaacccaccaccttatcaaaatcctctaaggtcgggccgcaacagcaacagggcttctccgagtctctaatcggcgatagtgtggaggcagctgacgccttcatatgccaatgggttactccacacctctgcgactcttcttcttcttcatgcagcctctcttccctcttctccgctcaaaaccgcctagaaggcagacgcttcctcgaggttctcggcaagttacaatacgccattcagagcaccgttgctatgaatccggactccgc

SEQ ID NO: 278 - DNA, 507 bp, Arabidopsis thaliana
attcgcggccgcttgacaccgtaggttcctgtcagaataatataaacactaattgtacacaatgcttttaaaaagcacccccaactccgaaaaaaattgtcatccctttttttagttgttctgttccgtctgcttctttcttcatcagactcttttaaagtcatttcgtctcgccagcacaagctataaccggaacttcccaaccattcagagtcttttatgctaaacaaaatagttttaaagatctttcactcacccgcctgttgcttctgatccacgggtttgacctgaaccgcagaggaaacagcgtgaacattagtgaaccctggaggcccaagctgatgttgttgagttttacccataccaccacctcctttcatgttattcgctgcagatgcagccgctatggctttcgctggatctgaagtggcggtgacagctcccgtgactggaacagcaggtgctgaacctgactgttgctggtgtctttggatgtaatacccacca

SEQ ID NO: 279 - DNA, 507 bp, Arabidopsis thaliana
gacaagttctttgaggaaggaatcttcagctgcatcggatgcaaaactcctctttataaatccaccacgaagtttgacgccggatgcggctggccagctttctttgaaggactccccggtgccattaaccgagcccctgatccagatgggagaagaactgagatcacttgtgccgtatgtgatggacatttaggccatgttcataaaggtgaaggttatagtactccaaccgatgaacgcctttgtgttaacagcgtttcgatcaattttaacccggccaaaccttcctctataacctgaggactagttgatcgtacattactttcaaatcagattgtggtgttcaattgtagaatcatcatcacgttacaaggatcaatgtaacagataataagaatcattagtggttcttaaaatatgtctgtttagaaaatatatatatatatatatgtatcctgtttataacgacaattctcattttaatacattttagtaaaaaaaaaaaaa

SEQ ID NO: 280 - DNA, 507 bp, Arabidopsis thaliana
cctgctataattggtcatgctgatgatgaggttcttgctgctttggctgagacaatgaagaaaggaacaagctttggtgctccttgtctcttagagaatgttcttgctgagatggtgatttcagctgttccaagtattgaaatggttcggtttgttaactccggtacagaggcatgtatgggtgtgctacgtcttgctcgtgccttcacagggaaacaaaagttcatcaagtttgaaggttgttatcatggtcatgcaaactctttccttgtcaaagcaggtagtggtgtagctactttgggtctacctgactcgcctggggtccccaaagcagctacttcagatactttaacagctccatacaatgatattgctgctgttgagaagctttttgaggcaaacaaaggagagattgctgccatcattcttgaacctgttgttggtaactcgggttttattacacctaaaccagagttcattgagggaatacgccggatcactaaagac

SEQ ID NO: 281 - DNA, 507 bp, Arabidopsis thaliana
ccacgcgtccggtcaagtcttggatttagtcgcaacctgaagccatcaagattttcttctgggatatcttcatctctacaaaatggcaatgcaagaagtgtgcaacccatcaaggccacggctacagaagtgccatctgcagttcgaaggtcaagtagcagtggaaagacaaaggttgggatcaacggttttggtcggattggaaggttggtcctccgcattgcaacatcaagggatgatattgaggttgtagcagtgaatgacccattcattgatgccaagtacatggcttacatgttgaagtatgattctactcatggaaatttcaagggaagcatcaatgtcattgatgattctactttggagatcaatgggaagaaggtcaatgttgtcagcaagagagatccatctgagatcccatgggctgatcttggagctgattatgttgttgagtcttccggtgtattcaccaccctgtcaaaggctgcatcccatttgaagggcggt

SEQ ID NO: 282 - DNA, 507 bp, Arabidopsis thaliana
ccacgcgtccgccgattctcttccttttttttagtttgatccgactactcaagctttttttctgttcatggtttcctccatcatcgcagttgcagaaggcaaaaagatggagctagaacccaataaatcactatctgctgacatgccatctttgctgggtagatcatctgaagcttttaatggaggcactggatatcgttcttcaagtgatctcagcatgttctcaagctcattgcccacactttatcatgaaaagctgaatatgactgattcagatagttggctctcctttgatgaaagctcacccaatctgaacaaacttgtcataggaaactcagagaaagattctttggaagatgttgaacccgatgctttagaaatattgctgcctgaggatgaaaatgagctccttcctggcctcattgatgagcttaattttaccgggttgcctgatgaacttgacgatctcgaagagtgtgatgtcttttgcacgggagggggtatgga

SEQ ID NO: 283 - DNA, 506 bp, Arabidopsis thaliana
tgatttttaatttaagttttcattcaattaaaatatttgaggaaccaatcagatttcgaaagaattggttcgagttgtgtagatgacataataaagaaaagaagtaacatcacaacttgagagcagcaattgattcgggtttgaactcgacccggagacccaaaacccgtctaacctcagctggtgtgagtctccaagtcatgggtcctgagttttctccccaaaagtccaaaatctctgagaccttttccaagttcagtatcgtcgccatctgcgttaaccgagcaaacttatctctcactgttctttgagtcatacccgagaaatggctaaccaaagcccttgtgtctcgatcaagctgaagcccaccaagctggctaaaccgtttctgcatcattatgacttcgagtctcttaactatgaaatcaattatgagatgcagaaacgagtcgtagttgttggatgtcattagtggttggagccacgcggcatttgtttcgactgag

SEQ ID NO: 284 - DNA, 506 bp, Arabidopsis thaliana
gcggccgctgcagtaccaaccaaaacagcgactgccttttacgagaaagaactgggtgtgcttctaacacctccatcagggaaaaatcagatgcaggagtggaaagggttacaatctcaccggttacttcaaatcgaaatcaacgatgcaaaaagaccggctagtgatgtggcaatatcagggttaggatggatttcaattgaaccaatccgcaaaacacgaggaactgaaccgagagatctcaatgaagcagagcatgagatacatatttgtgtcagtgtgccaaaaccagttgaagtttttcttcgaccaacattgccaattggtacttcaggtactgaatggtatcagtatcgtgagttaaccgataaggaagaagaagtaagacccaaatggtacttttgaatttttttttgtttagatgcaaaaatatcggcttagtatcacaaaccagagttatatgtaacaaaatagtaaattgtttgtaatgaaatctgcggccgcga

SEQ ID NO: 285 - DNA, 506 bp, Arabidopsis thaliana
ttttttaataaaacagagagaaatattcttatttgagtacaccacaagttattaattacagcacgagaaactaaaaaataccccaaatgaaaagcagagatttaagtatatgcagagcaattaaatacaaacatttatgctttgctttttcttctctctaacttcccatttctcaatcccctttaaaccaaatcccgagaccaaataaacctaaaccgtaacacaaaatcaaaccgttactaaaccgttcaaagacgttttcagtttagagtttgacaacttcgggaataaagacagggtaacggtcgatacaatcggaccatggtccgtccttaggtgtcttaatcgtacggttacacttccacacggcagagttacacttgaaaccactcccaaacgcgatttgccaaacgcgatcgcctctcctcattctccctttagactcgatgtagctaagctcgtaccataacgatgaagatgacgtgttaccaaaacgatgtagtgtc

SEQ ID NO: 286 - DNA, 506 bp, Arabidopsis thaliana
ccgggcaggtcgcacttcatagcctcaatctctcaacaagcagaagagattcgattctccattatcttccttctaaatgccttccctaatgttatctgataagaaagaggagaagaagatgaagaagaagatggctttggataccccagagcttgattctaagaaggggaagaaggagcagaagctgaaactatctgattcggatgaagaagagtcggagaagaagaagagtaagaagaaggataagaagcgtaaggcttccgaggaggaggatgaagtgaagagcgattcaagctcggagaagaagaagagcagcaagaaggttaagttgggcgttgaggatgttgaagttgataaccctaatgctgtttctaagtttcggatttctgcgcctttgagggagaagcttaaggcgaatggtattgaagctcttttcccgattcaggcttccacgtttgatatggttctcgatggtgctgatttagttggacgggctcgtactggtc

SEQ ID NO: 287 - DNA, 506 bp, Arabidopsis thaliana
tcgagcggccgcccgggcaggtgcgttcacactgttgctgaactagcaggccattgctgtgcccgtgagccttaccagagaccagacatgggacacgcagtcaacattctgtcatcactcgttgagctatggaaaccgtcggatcagaatccagaagacatatatggtatcgatctcgacatgtctttacctcaagcacttaagaaatggcaagcttatgaaggaagaagtgatctcgaatcttcaacttcatcacttttacctagcttggacaacacgcagatgagtattcccactagaccttacggattcgcagagtcattcacttcagtagatggacgatgaatgagagattccttgaaacccagatttgatttttctccttttgtatatttgtgtttcctctcctcttcttcccctcacaattctttcatgtttcttgtgatgcaagtaacatttagggcttaatttgggtgtcttaatattattttgatgttgagtgtttt

SEQ ID NO: 288 - DNA, 506 bp, Arabidopsis thaliana
gaatcatctttcaacaatggcttccactgctctctccagcgcaatcgtaagcacctctttcctccgccgtcaacagacaccaatcagcctcagatccctcccgtttgccaacacacaatctctcttcggcctcaaatcttccaccgctcgcggcggccgcgtcacggccatggctacctacaaggtcaagttcatcacacctgagggagaacaagaggtcgaatgcgaagaagatgtctacgtcctcgacgctgctgaggaagccggactcgacttgccctactcatgccgtgccggttcttgctcaagttgcgccgggaaagtcgtctctggttctattgaccagtcggaccagagcttcttagacgatgaacagatgagtgagggctatgtcttgacctgtgtggcttatccgacttctgatgtcgtcatcgaaacccacaaagaagaagccattatgtaaaattttaaagctttttgatgaatttcatcaaaagagaaattac

SEQ ID NO: 289 - DNA, 506 bp, Arabidopsis thaliana
tggccgtgagaccaaagattggagatacgaaggagctgtaacacctgttaaataccaaggccaatgtggatgttgttgggcattctcaagcgtcgcagcggtggaaggtttgacaaagattgttggaaacaacctagtatcattgtctgaacaacaacttctagattgcgacagagagcgtgacaacggttgcaacggtggaataatgtcagacgctttcagctatataatcaaaaaccgaggcattgcctcagaggcatcatacccttaccaagcggcagaggggacatgccggtacaatgggaaaccctccgcatggatcagagggttccagaccgttccaagcaacaacgagcgtgcattgctcgaggctgtatccaagcagcctgtctcagtgtccattgacgcggatgggcccggtttcatgcattactcagggggagtgtacgatgagccgtactgtgggaccaacgtgaaccatgcagtgacgttcgttggatacggaa

SEQ ID NO: 290 - DNA, 506 bp, Arabidopsis thaliana
gcaaagctcagtattatacagatctgtagataatgaaaactctggccatcgaatgatatctttccaccaaagagaagaggttgtgtacataaaagacctttgaattaacctaaataagaagataagagaaaaataactcacattttatggtttatgaatttgatatcgaaagatctcttacaagccatgtaaaaacaagaattcccccataattttacagtcgtccaaatcatcaatatgtcatcatccttctcaatttagtgttgaaatcaaccacagcctctggccccctatatcaaaactttgttcgtctgtttagagtacgaagatgagaaggggacgcgtttgttgcgaaacatcatgtaaccaaccggtaatacaacaccgatcatcatcaccgccgatccgatcaagtaccgtaacagactcggaggctccacttctatcaccgtcttaaacggcattatgacgtcggagaaaggattcgccggtgatgaaccaaactt

SEQ ID NO: 291 - DNA, 506 bp, Arabidopsis thaliana
ataagcttttctctcaagctgagctctaccatttttgtgcaagcattttagaacttgttattccagtttacaagagcaggaaggcttatgggcagttggctaagtgtcacactttacttactaatatatacgagtccattcttgaccaagaatcaaacccaatcccatttattgatgctacatattaccgggtgggattttatggggaaaagtttgggaagttggacaggaaagaatatgtataccgagaaccacgagatgtgcggctaggggatataatggaaaaactgagccatatatatgagtcaagaatggacagcaaccatattctgcacattataccagattcgaggcaagtgaaggcagaagacttgcaggcaggagtgtgctatctgcaaattactgctgttgatgcagtgatggaagatgaggatcttgggagcagaagagagagaatattttctctttcaactggaagtgttcgagcacgagtgtttgatcgtttc

SEQ ID NO: 292 - DNA, 506 bp, Arabidopsis thaliana
  misc_feature (1)...(506): n = A,T,C or G
ccacgcgtccggacgcatttaacagcgacttgcagtatgagtttgttgaaaagaagtttgccactttattgcaccagtgtttacactgcaccaagaaagggtctactaaggagacttcattagcaactcatgtcattgggttgctagcgttaactgttggactcggggatcatgcacaagaggttttggaagaatctgtcactcctctgtctcaagcccttaaatctggtcgtgaaatcttgaaaataacttcgatacttgagtgtttagcnnnnataaccttcgttggcgggaatgatccagagcaaaccgagaaatctatgcagattatctggcaaatgatccaccccaaactagggtctaatgttgtggcaactaaaccttcacctgctgtaataagtgctnttgtatcttcctgggcttttctgctcacaacagtnnatcggtggactctaggtcctaaaatttttcaagagactgtaacttatctctctacattgttggaa

SEQ ID NO: 293 - DNA, 506 bp, Arabidopsis thaliana
  misc_feature (1)...(506): n = A,T,C or G
gatgcaactcttggctggttccaagattattgaggttgacaacaatgttcgtgaggatcgtgccctcttgaatggtgctcagaagcttctaggtattctgattgccattggtgaggctgttgcatatgttctttctggaatgtatggtcccgttggacagcttggtgttggaaatgccattctgatcatccttcagcttttctttgctggaatcattgttatctgccttgatgaactccttcagaagggatatggtctcggatcaggaatctcccttttcattgccaccaacatttgtgaaagcattatctggaaggcatttagcccaactaccatcaacaccgggcgtggagctgagtttgaaggtgctgttattgcactgttccatatgctgataaccaagtccaacaaggttgcggctctccgccaagctttctaccggcaaaaccttnnnnatgttaccaacttgcttgccacagtcttgatcttcctgattgtgatctact

SEQ ID NO: 294 - DNA, 506 bp, Arabidopsis thaliana
tcgagcggccgcccgggcaggtacactcctcggttaatccgcaacaatcacacgtcaccgaatctggctcatcgccggagatttgagtaaccgataccggagagacgagtattacctccggtgttgaaattagcattgttggatcacttagaacactcgcagacatggtttcttgattttaaaacccagtagaagaagaagagaagagaacgcaattagcttgtgatctattttcttcttatgtctctgtttctgaaacagaggaagggttttaagaagggaaaaagctttttttttcttaaaagaaattgaaaactttttttttatatttcgttttgccactctccgtcttctaaattactttcttctccgagaaaaatttcacaaaacaaaatcattgcaaaaaacggagtatattaaaaattctttttttctttggcttttcttgaaaacaaatagaaaaagttaccgtttctctttacttcacggaaaaaaacactagtagt

SEQ ID NO: 295 - DNA, 506 bp, Arabidopsis thaliana
ccacgcgtccgaagggctaagtggttcagccgggtgtgcagtgagctcagatggttcgtttgtgctggttagtcagttcacaaaaagtaacatcaagaggtattggatcaagggacccaaagctggttcttctgaagacttcaccaactcagtctcaaaccctgacaatatcaaaagaattggctctactggaaacttttgggtcgcttcagtggtgaacaagatcatcgtacctacgaacccatcagcagtcaaagttaactctaatggtgaagttcttcaaaccattcctctcaaagataaatttggagacactttgctcagcgaagtcaacgaattcgagggcaatttatatataggaactctcaccggaccatttgctggaattcttaagctcgaaaagggttcttgtcctgccacttagatctcttatttgaatgcagccgatgtgttacaatcatatatatatatttgagctttttattaaaaaaaaaaaaaaaaaaaaa

SEQ ID NO: 296 - DNA, 506 bp, Arabidopsis thaliana
  misc_feature (1)...(506): n = A,T,C or G
ccacgcgtccggccaccaaggctaagatccccttttatggaagctacacagaatccgatcctgtgaaaattgctgttgagggagttgataggttcaagaaagaaaagtgtgatcttattattgttgacaccagtggtcgccataaacaagcagcttctctctttgaagaaatgcgtcaagttgctgaagcaacggaaccagatcttgttatatttgttatggatagcagtattggtcaagctgcatttgaacaagctgaagcttttaaggaaactgtatctgttggagctgtaattattactaagatggacggccatgccaagggaggtggtgctcttagcgctgttgcagctacaaaaagtcctgtgatattcattggaacaggagagcatatggatgagtttgaagtgtttgacgttaaaccatttgtcagccgtctctnnnnnaagggtgattggtctggactcgtggataaactacaagaggtggtacctaaagatctacag

SEQ ID NO: 297 - DNA, 506 bp, Arabidopsis thaliana
cgtccgcttaaagcaactcaaagctcaaatcgaaatttctagtttctctttatcattcacgctaagtgttcaatcgaatcaagattaagtatggcagaagagtacaagaacaccgttccagagcacgagacccctaaggttgcaacagaggaatcatcggcgccagagattaaggagcggggaatgttcgatttcttgaagaaaaaggaggaagttaaacctcaagaaacgacgactctcgcgtctgagtttgaacacaagactcagatctctgaaccagagtcgtttgtggccaagcacgaagaagaggaacataagcctactcttctcgagcagcttcaccagaagcacgaggaggaagaagaaaacaagccaagtctcctcgacaaactccaccgatccaacagctcttcttcctcttcgagtgatgaagaaggtgaagacggtgagaagaagaagaaggagaaaaagaagaagattgttgaaggagatcatgtgaaaacagt

SEQ ID NO: 298 - DNA, 506 bp, Arabidopsis thaliana
ccacgcgtccgcgccgactctctgctccggcgccgcgaattaggttttatcattctacgatccgatttgctcatttccgaagattcacaacggcttctccttcaatgagccagcagactggcgaaatcgatgccgtcgtcgatgcttcgtcggcggagaaacccgacgacgtcgtggtgcaatacgttgtgcttcgacgagatctaatcgattcgtggccacttgggagcgttgtaacacaaggatgtcatgcgtcagtggcagcgatctggtcgttcaaagacgatccggtcacgcttcagtactgtgatccgcagcacattgattctatgcataaggtgactctggaagttaaaggggaaacgcagatgatgaatttgtcagagaagctgaaattaggaggaatctctcataagctatggatggagcagccggagaatattccgacgtgtattgctacaaagccttatcctaaatcccaagtctcttctttcttcaaaaagctc

SEQ ID NO: 299 - DNA, 506 bp, Arabidopsis thaliana
cgagcggccgcccgggcaggtcaacactgtcactcaaaaagaatcttcaaacaatgaatctcaacgtcgtcgttttactcctactccttctaatctcatccgccacgtgttgtccgccgtcagaccgccgtgcacttctagctttccgatcagctcttcacgagccttacctcggcattttcaactcatggacaggccaagactgttgccacaactggtacggtattagctgcgactcgctcactcaccgagtcgccgacataaatctccgcggcgagtcagaagatccaatcttcgaacgagctcaccgaaccggttacatgaccggacacatctccgcctcgatatgtgagctcactcgtctctccgccattacaatcgccgattggaaaggtatctccggcgaaatccctaaatgtatcactcgtcttccttttctccgtacactcgacttaatcggaaaccaaatctccggtgggattccatacgacatcggaagattaaac

SEQ ID NO: 300 - DNA, 506 bp, Arabidopsis thaliana
ttccaagttctcggatttgaatttgcccacctactacatgctagctgctggtttcctctggatgtctatgtggattttcggtgtcatcggtgccttgaacttctattttccgccacttgtgattattggtttggtgttaagtctggcttggacgacagaagtgatgaggaatattgttaatctaactgtgagccgggtcattgctttgtactatcttaggggaatgcagtctagtaccaggtttagtttccaaagggccttgtctcgtaacctcgggagcgcgtgtttaggatctttgtttgttccaacaatagaagccttaagaatcttggcaagaggattaaatttgctaaagggtgaagatgagttcatgttttgctgcgctaattgctgtctcagactcatggacttcatatttgaacatggcaatggctgggcctttgtacagatagcggcttatgggaaaggatttgtgagggcatcgcaagacacatggaaactgtttg

SEQ ID NO: 301 - DNA, 506 bp, Arabidopsis thaliana
cggccgcctaagattcgttgtgagcaatgtcttctgtttcaagccagccacagtttcgttacacgcaacctccttcaaaggttcttcatttgagaaacttgccatgggaatgcactgaagaggagttaattgaactcggaaagccttttggtactgttgttaatacaaaatgcaatgttggagctaatcgaaatcaagctttcattgagtttgaagatttgaatcaagctatacaaatgatatcttactatgcttcttcttcggagcctgctcaagttcgtggtaaaactgtctacctccagtactccaacaggcaagagatagtgaacaacaaaacgacagcggatgttgtggggaatgttcttctggtgactatcgaaggcgatgatgctcgtatggtcagcattgatgtcttgcatctgcagggccatgtcaaggcaatatcttcagtggcagcctaatgcattaggagaaagagcacatgtattctcagcatttgggtttgt

SEQ ID NO: 302 - DNA, 506 bp, Arabidopsis thaliana
cggccgcggacttttggccactgtcaccgttggagccaacgtagtttcctactctcgtttccgtcgccagaatctcgcgaagtttcgctctccaatcgacgaatctaaagaagttctcgctgatttcaattccattgaacacgaggaaggaaaattcttctttgggttagctactgcacctgctcatgcggaggatgatttagatgatgcttggctccagtttgctaaagaaacaccatgttcagcagaagaagcagaggctgctgataagaaagctaggaggaagaaggttaagcttgctgtgggagctataaccaaaggcttggccaagaacactcatggcaaagaagataagaatgcagctgataagccaccctctaaaaatgttgccgcgtggcataacgctcctcacgcggaggacaggcttaaattttggtcagatcctgacaaagaagtgaagctagccaaagatactggcgttactgtctttaggatgggagtcgatt

SEQ ID NO: 303 - DNA, 506 bp, Arabidopsis thaliana
cggccgccagagattgagctctcaaggcagctcggtgcttgggctaaggtgctacatgggatggaaggttactgtgtgaagtcttttgctgaagctctcgaagttattccttacacactagccgagaatgcagggttaaaccctatcgccattgtgactgaactcaggaacaagcatgctcaaggggaaatcaacgcagggatcaatgtgaggaaaggacagatcactaacatcttggaggaaaatgttgttcagcctctgcttgtgagtaccagtgcgatcactttagcaactgaatgcgttaggatgattttgaagattgatgacatcgtaactgtgaggtagtgtggtagtttctttcaaaacaggtcccagaacacttctattgctctatctaagcttttgtttcgtttttttcatgtgttgtgcttgcacaatggttttgaacttagactcccttttccttaaaagcatcaatgtttcttattattcgatgatgctatgac

SEQ ID NO: 304 - DNA, 506 bp, Arabidopsis thaliana
  misc_feature (1)...(506): n = A,T,C or G
gtctttcttacaccacggataaaattaagagccgagtgaatcagagtaaatatctatgctaaaaacatcacaatcaaagacatttgatatctgtaaaacccagaatcaaataagcagagcttggagccnnnngagagcacaagagtttcaaagaatagagtaagcacgaactacctcaatcacaggggcttgacacatgggacattttcctcccgcttccactagcttctttgcacacttnncgcaggtgttcatatgtccacatctatacaataaagagtcaatattgctctcgcagcatacgcagcagatccctttccttacatattcccattttgactcgtaactcgcagnntccttggatggacctggttggtcagtagagcggtgcatcgcagcagagacctcttgtcttatggaccgttgtaactcgagttgcatttccatgcaagcctctagcatcctctgcaggttatccatcctttgctgtattctacccatgtcaa

SEQ ID NO: 305 - DNA, 506 bp, Arabidopsis thaliana
cacaactaaagtagagatatagagagagaggaactttggattgtttgtgtctttgtgacagatggcagagataaacaaacaaagcaacaaatgggaacaagaagaggttagtaatgaaaataattgggaattggctgaagaagaaagtgttgactggagagggagaccttccaaccctaacaagcatggtggaatgagagctgctctctttgttcttggactacaagcctttgagataatggggatagcagcagtagggaacaaccttataacttatgtaataaacgaaatgcatttccctttgtctaaagcggccaatattgttaccaactttgtcggtaccatctttatctttgcccttctcggcggctatctctcggacgcctttctaggcagcttctggaccattatcatattcggcttcgtcgagctttctggtttcatactactatcagtacaagcacatttaccccaactaaagccaccaaaatgtaacccattgatag

SEQ ID NO: 306 - DNA, 506 bp, Arabidopsis thaliana
ttgtaatctggaaactgaagcatgtataggccaataaattacattctccaaggaaattgcttaaatgtgttcgcttaagtaagtatacagacaaacaaacaaaaacactgatccattacactttactttccagcaatttctattagctatttaaggcgacagctatgcatgttgtaacatgagcagacaaaacttacgtcgaaaaccaacctcagttgattagaggcgtacccatctgcgaatctgcacctatatcagttgcgaagtccttaggcaatgggatatttaattccgagcaaacaagcttcacaatattagccgttacacctcccatagacatcttgttcagtgttactgcaatggaaaatctgttgttgatgtcacagaagcctgttgatcctcctaaccctgaatgtccaaagccaaccagagacccatcttgagaaatggcgcgcttaaaaccaagcccaaactttccatcaggcactactaagccactgtagtct

SEQ ID NO: 307 - DNA, 506 bp, Arabidopsis thaliana
cggccgcgtcaacgtaagaaagcgtcatgcatgttagaaagtagaaacacttgttgaaaggtataattaaaacaagagattcttcattagctctttctcgtccatttagacgccaccataatctcttgttgtcttgcatttgaagcattctgccctgcttgcgtagttatgaaccccacatcccaccctaggacaaacccaatcgccagttttccatccgggaggacaagctgcgccatcattcccgtaagcaaccatttgagctccatagtactgttccgtatactcgactttgatcattccacatcggtaacaacttgttcggctcgcgtaattgtggctcccacaattcaatgcaccacaataccaatcaccagccataacttcggtcctgttgtacaagtacgttgacacatcaacccctccaaatttggggtatccgcatttttgacatgattctcttttcttgaagtttgcgtgctgacacgcaccacatagccaatctc

SEQ ID NO: 308 - DNA, 506 bp, Arabidopsis thaliana
ctttctacttttttttggttctgcgatttccatcaaaacccttttcccaacaatcttggttttgtacagagaagaagaagaagaagaaaggcacacaaaataacccatgtctggtttatacaataactcatcttacttctctcctgctcgagctgcttctcctcagattagaagcactcctgagatcgacagctctcagtacttgacggagcttctcgctgaacatcaaaagcttactccttttatgcaggtcctacccatatgtagccgtctattgaatcaagagatgttcagggtctctggaatgatgtctaaccaaggatttggtgattttgatagacttcgacacagaagtcccagccctatggcttcttctaatcttatgtctaatgtctctaataccgggttaggaggctggaacggcctctctcaggagagacttagtggaacacctggaatgacaatggattggcaaggtgcacctggaagccccagttcatacaccg

SEQ ID NO: 309 - DNA, 506 bp, Arabidopsis thaliana
cacagccaccactcattctcacctaccatctctactctactcgactacactacactacactccactgactcagtacgtcagcagtgcatcctctctacagcatgggctcacaatctcaacaacggcgctatgaaggcaaagtggtgctagtgactggtgcaggtagtggcattggtcgttccactgcattagcattcgcccaagaaggtgccaagctagtgctgggagggcgcacagagagcaagctgcagaagacagcagagctgatccaacagcaagtgaagaacgcacaggtggtctaccatgcaggggactgtgggctagaggaagtcaaccagaagttagttgagctagcagtctccaagttcgatggtctgcatatagccatcaataatgctgccgtccttgaggttcataaggctgtggacatcagccaagtcagtgtcaacaatcaactggcatccaacgttcatagtgtcatatatgggatcaagcaccagctaggc

SEQ ID NO: 310 - DNA, 506 bp, Arabidopsis thaliana
agaatcgcttctcttgtcgcctctcctttcaattcttcactcggaaagctctctgttaactcctctagtgggtcagaccgagatgcgcctaagccgctcgatattgtctcgaacgatatcgtcttgtcctctcttagaaactcagggaaagtagcagtaatggcttctgaagaaaacgatagtccaacttggatcaaagatgatggtccttacgttgtggttgtagatcctctagatggatcacggaacatcgatgcttcgattcccacgggaactatatttggaatttacaatcgtctcgttgagcttgatcatttacctgttgaagagaaagctgagctcaattctttgcagagaggcagcaggcttgtagcttccggttatgtgctatactcttcagccactatcttctgtgttacacttggatcgggaacacacgccttcacgctagaccattccacaggagaatttgttcttacccatcaaaacatcaagatcccaactcg

SEQ ID NO: 311 - DNA, 505 bp, Arabidopsis thaliana
ttttttttctaacacacttttattgcatctctctcaagtacaaagttacagtcttgtgacacacacatgaaccatatacataagctttgcgttataaaacaacagctcttagcttcagagtgccgaatatccgattgtcttctccgacatgaactcaaggacaagtgctgatgctcctcctcctccgttgcatattgatgccactccatactttcccttctttgctctcaacacccccaataatgtgaccaagatacgagcaccgctacagcccaatggatgtcccagtgaaacagcccctccatgcgcattgagccgttcaggatctaatcccagtagtttctgattggctagagctaccacagaaaatgcttcgtttatttcataataatccacttgagatgcatccaaaccagcccgctttatagctttaggaatagcaagagctggcgtggttgtgaataactctggtgcctgagcagcatcagcgtatcctctaatctta

SEQ ID NO: 312 - DNA, 505 bp, Arabidopsis thaliana
  misc_feature (1)...(505): n = A,T,C or G
caaccggttggcatatggttatcggtggccttcctcttttggcgatttctgttataaatcatgacccggtttttaatgncagtcttcaagatctatccacaaatgatgttatagcacttctctacacatccatttttggcagcgcagttagctacggtgtttacttctatagcgctactaaaggaagcctaactaaactcagctaactcaccttcttgacaccaatgtttgcatcaatctttgggtatctgtacctcaatgagactttctcctcattgcaactggtcggagcagcagtgactttggtcgctatatacttggtgaactttcccgaaggcaacgactgagacactctttgagttcnnncttacactctttgagttcttacgtcatttttaaacttgttatgaaggtggaaatgtatcatagtttcattatcttcaatcttattgtatataataaaatgaagcatcatagttcagtgttaatcaaaagccaagtttcg

SEQ ID NO: 313 - DNA, 505 bp, Arabidopsis thaliana
gatacaacgcccgcttggccaagggaataaaaagggtctttcacgtctgcaggttttaatggcgacaatttcgttaagaagaacaaaagaaaagagtttgattggtttaccgcctaagactgttgaaacttgttatgttgagctttctccggaagaacgtcagttatatgatcacatggaaggagaagcgaaaggtgttgtgcagaatcttataaataatggaagcttgatgcgcaactactcaacagttttgagtataatcttacggcttagacagctttgcgatgacatgtctctatgccctccagaattaagatcttttaccacttctacatctgtagaagatgtgactgataagccagagctactgcaaaagctggttgcagcattgcaagatggcgaagattttgactgtccaatctgcatttcgccaccaacaaacatcatcatcactcgatgtgcccacatcttttgcagggcttgtatccttcaaactcttcaaaga

SEQ ID NO: 314 - DNA, 505 bp, Arabidopsis thaliana
ggcaagatattaaaagcgagtttattgcaatggcatcaaccttatctaaagagatggaaatgatggaagcacagttgaaacggtggaaggacactgcacaagatgctctttacctgcgtgaacaagctcaatcgttgagagtttcgttaagtaacaaggcagacgaacagaagggtttggaggataaatgtgctaaacagatggcggaaattaaatctctcaaggctctaattgagaaactactcaaagaaaaactacagctgcaaaatctagcaagcatctgtacgcgtgaatgtaatgatgacaggggactggcagaaatcaaggattcacaacggaaagcccaagctcaggctgaagagctgaaaaacgttttggatgaacactttcttgaattgagagtgaaagcggctcatgagactgagagtgcttgccaagaaaggcttgctaccgccaaggctgaaattgctgaattgaggactcagttagatctttctgagaggga

SEQ ID NO: 315 - DNA, 505 bp, Arabidopsis thaliana
gcggccgctttatttcaaaccccctcatgtagaaaaaaaattagagagtttaattacattttggttcatgatgctttagaaaactaaactaaataaatacttttcacacttcaattagctctttcatgacttgtccatctttcacaccaaaagatccattcgcttcagcatcagaactcgcatgaacgccataaaacaaatacacgagcacgatcaaaccggagaagaatccaaaccggacgtaagagggtgcgtccaacgaaccaagcaaaaaaatgttcaagaatatcgacacgcacggggtccacggcatgaacgggactccccacaactcaggtttcctagcctggggaaccacgcactgaaagctcagcacgatggctatagccaccaccgcactggcaccgagcatgaaagctttaggcttaccttccggcacaagtttccagatgagggtgaagacgagagaggttatggagaatagtgtgaggaagcagagtgtggg

SEQ ID NO: 316 - DNA, 505 bp, Arabidopsis thaliana
ccacgcgtccgaagccttttggatcgccctccaattaatatttccgagtttcttgtttatgttgttgagtgtggtttaagtttctcagttgtcactacaccaaaattattattgtttgtgcagcaattgtaatgagagacagatacacagataggtccaggggttttggatttgtcacatacagcagtcactccgaagctgaagcagccgtgtctgggatggatggaaaggaactgaatggtcgtagagtgagcgtgaaactctttggtattggtgatattgatgatgaatgacgatgatggtgctgacttgaaaggtggaacacatctctatccaaaaataaaaaaacattcttgtaatgtattgtgtgctttcatgtgtttgcagtgtctgtttttgtctcctttcaagggtttgtttccaggtctgctttgatttgattcccgtgtatgatgacttaataaagacgtttccttatcctttaaaaaaaaaaaaaaaaaaaaaa

SEQ ID NO: 317 - DNA, 505 bp, Arabidopsis thaliana
  misc_feature (1)...(505): n = A,T,C or G
tttttttgaataaattacgaaacgtgtaaaaaattcactacaagaacaaaccagtcgaggatcagacaaacgagaaaaagctaggtacggtttaagacattttcttacaacacaattaaagagaggaaaaaacgaagcaagacgatacaaaaaacaggatttatagaagcaagcttacggcttaataataacacagcgtgtgtttgtcttacttgatgtattgagaaacccatttgaaaccttctccgtaacccattttcctgacaatgctgcacatgaaaacctccaatggcctaacgttcgaatccgttagattcactttaccctttcctgtagtgaagttggagaggccgagatggtaacggagctcgtcctctgatgcagcatacggtatgtctatcttgtttcctagaatgaggaatggaacgctgnnnagggattcgnnnnagagaagtgcatcaagttccttttttgattctgcaaatctctctttgtcgtaagcatc

SEQ ID NO: 318 - DNA, 505 bp, Arabidopsis thaliana
  misc_feature (1)...(505): n = A,T,C or G
acatgatgaattagtattggctaaatacaggacttaacatgaaggctatggtacgcgatatatgactcaaagaatggtgcagccgcttccactttcataggtagtaacagacacaacatcacaactgttgcagtaaggtggcttgcatacatgctttggtggttcaggtgctggtggagtctttggtttttcaggctctggaggctttggtggctcaggaggttttggtggtggtccaacgctaatgatcacaggtttctgtttaatctttttcagccttgttgctacgcagaccggatccattgtccccaccacggtaagtatactatttccttcatctaatgaaatatgattcacaccttctatctctgtgactgcttccatgattgcgctnntgcattttccacagtttatatccaccttgatctcaactttcttgacagtcatgatggattagccaagatcgagaaaaatggattaaaggaatgaagaaggaagagaagaa

SEQ ID NO: 319 - DNA, 505 bp, Arabidopsis thaliana
ctactttgagcgagaagaaaggagtgattttattgggagatgcattcaacatgcgtcatccagcaatcgcatctggaatgatggttttattatctgacattctcattctacgccgtcttctccagccattaagcaaccttggcaatgcgcaaaaaatctcacaagttatcaagtccttttatgatatccgcaagccaatgtcagcgacagttaacacgttaggaaatgcattctctcaagtgctagttgcatcgacggacgaagcaaaagaggcaatgagacaaggttgctatgattacctctctagtggtgggtttcgcacgtcagggatgatggctttgctaggcggcatgaaccctcgtccgatctctctcatctatcatctatgtgctatcactctatcctccattggccatctactctctccatttccctctccccttcgcatttggcatagccttcgactttttggtttggctatgaaaatgttggttccccatctcaa

SEQ ID NO: 320 - DNA, 505 bp, Arabidopsis thaliana
gattaaaccttatccaactaagagaagccatttttttttttttgggtctctgagttgtgtattgagcttcatctccttcaaatggcttccttatcaaccacttccctaagcttcaaagctccgtccaccacaatttcacaggttttaaggaaagcctcaagttctcagtctgtgacctttggtcgtttcacgtcttcaacaaagagccttcgtcttcaaatcagttgtgccgcgaaagcagagacggtgcagaaagtgagtgacattgtaaaagaacaattggctttagctgctgatgttccgctcactgctgaatccaagttctctgctcttggtgccgattctctcgacaccgtggagatagtgatggcgttggaggaaaagtttaacataagtgtggaggaatctgatgctcaaaacattacgaccatccaagaggcggctgatttgatagaggaccttgttcaaaagaaacccgcggcggaaacttcctgaaccggctgtc

SEQ ID NO: 321 - DNA, 505 bp, Arabidopsis thaliana
ccacgcgtccgtgaagatgagttttgaagataatttggttgtgaataaatcgttggagaagaaactctcagcgagtggatcggtctctgtgtttgataatattgaaattcgaaatttgaatttgagtagttttgttcaggttttaggttttacgttgagatctgtgagaagcttcgtgaaattgattgtgaaggagatggaatcagcgagctgggatctagacgccgccgcttccgccgctgtttcggtgaacgttaaaaacgcttccaccgttttcgcgaggccgagtcaccgttgtttcgcgtttgaatcgtttgtttgtgggaaaatgtttgagaattttggagctcctgatttctcgagacgtgaggaattcgaaaagttgagatccgttgacccgattcagtacttgacccggaacccgggttcgtcttttgccaggttcgtggttcataagtacttgagcgttgtacatgcgaagatggagtgttctttcttcgggaac

SEQ ID NO: 322 - DNA, 505 bp, Arabidopsis thaliana
ccacgcgtccggacgtccctattccacctcttttcgaaagcgctgctctctggggtgtgttcctcggcttatcttccaatgcgcgttaccaaatcatcaacggcctcgaacgcgtcgtggaaggttctacagcggccaaacgtatccctgtggtcgctatggcattcacggtgggagtccggtttgctaacaatgtgtatggcggtatgcaatttgtagattgggctaaattgtccggcgttcagtaatcaaccggttcggttttgttacaaaccggatagtaaactagcctagatgtcaatcctcaggagtatgagagtatctctaatctgatggggaagtttagttatctgagtttcattagtgtgattaggttatttaccgagagctacagaaagagaatctggttcatgatacggaccggattcttctaaccggaatactactcgatacaacattttcaatttggttttggaagttgagtttctcaaaaaaaaaaaaaaaa

SEQ ID NO: 323 - DNA, 505 bp, Arabidopsis thaliana
ccacgcgtccgactaaaactacattgcgtgacttcttctgtaaccatttttctattccgatcaaaccatggcgtatttagctccgatttcttcatccttatccatattcaagaatccccaactctcaagattccaattttcttcttcctcaccgaacccacttttccttcgacctaggattcagattctgagtatgaccatgaacaagtcgccgtctttagtggtggttgcggctactactgcggcagagaagcagaagaagaggtatcctggagaatcaaagggttttgtggaggagatgaggtttgtggctatgagacttcatactaaagatcaagctaaggaaggtgagaaagagactaaatctattgaggaacgtcctgttgctaaatgggaacctactgttgaaggttacttgaggtttcttgtggatagtaaattggtttatgatactcttgaactgattattcaagactccaatttcccaacttatgccgagttcaag

SEQ ID NO: 324 - DNA, 505 bp, Arabidopsis thaliana
  misc_feature (1)...(505): n = A,T,C or G
ggcatcttgatggttactctttctgggttgttggaatggatggtggacagtggagtccagatagtaggaacgagtataacctacgcgatgcagtcgctcgctgcaccgttcaggtatacccaagctcatggacggctatattgatagcactcgacaacgtaggaatgtggaatctaagatccgagttctgggcgaggcaatacttaggacaacaattgtatttacgtgtgtacacaccctcaacttctctcagagatgaatatccaatccccaagaacgctcttctctgcgggagagccagtggtcgcagcaccagaccgctttgagctggtggttagatatagaaatgacggagagatggtcagccaaaccagctgacgcgttcttgaggcgggtttcttgttttatacacattcttcattttgctaatgaatgagaagagtttatgttannatcagtatatcagtttgtaacgatctcagctcgaggtgcggccgcgaattcg

SEQ ID NO: 325 - DNA, 505 bp, Arabidopsis thaliana
ttttttgattctaatatgttgattggaaactcactgttatacatcaaggcatcaattgcagaacctgtttatttactgtgatgatccataagcaattcattgtaagaaaggcgtgtccttgatatttaattaaactatctcttattgagtatggaacaacttctgttctttattggttgctttcatcaaggaagtctggttactcctcttttctttttatttatcaaccttcacattgaaatgctgaaactttaaatgttcgtgacaggccggtggtattagcaaaggtgatcttctcaggatctttctctttgatgaagatatcattcacaggaacccagatcatgagctctttgcttttgactccggtaagtctcctcatacggcggtcctcaacaaacgcagttatctccgtgtcatataaaactctgcgacctatctcacggaatgtatgctcaatcttgcttctcagcctcatccacacaaacccttttgttttgttgta

SEQ ID NO: 326 - DNA, 505 bp, Arabidopsis thaliana
  misc_feature (1)...(505): n = A,T,C or G
catgaagcaagaggagattcgtattagccaccatgtctttgagacctaacgctaagactgaggttcgccggaaccgctacaaagtggcggtggatgctgaggaaggaagacggaggagagaggacaacatggtcgagatccgtaagagtaagcgtgaagaaagcttacagaagaagcgtcgtgaaggccttcaagctaatcagctacctcaattcgctccttcttctgttcctgcttcatcaactgttgagaagaagttggagagtttgcctgctatggttggtggtgtttggtcagatgatagaagtttacagcttgaagcgactactcagttccggaaattgctttctattgagcgtagtcctccgattgaagaagtgattgatgctggtgttgtgcctcggtttgtggaatttctcactagagaggattatccacagcttcagtttgagncngcttgggcattgacaaacattgcttctgggacttcagagaatacaaaggt

SEQ ID NO: 327 - DNA, 505 bp, Arabidopsis thaliana
tctagagcggccgcccttttttttttttttttgaaaattgattgctaaatatctatgtagctcactttttaagctacgtttctatcacaacatgtgcagaattttatgaaaccttatggtatcttcatttctctaacacaacttcttcgtatattccctgtatactaacgtatcctaatatctatactatacctgtataaaaattaaataattttgctttttgtgcatcaatttagttggctggattatataaactggttcctagactcttgtatagagcagtgtctgaatatactgcacgagacctcattgccttgtgtttacgtctgttccttcgacctgctcggtgtcgtgggaagacttttgcgtccttctctgtttcctcttttacgactttgacatcatccttacatttgatctcatgaacttcacttacacctgctactggaacaatgtacacaaacggtccgttttggatatctttgaggtctagaataggctctag

SEQ ID NO: 328 - DNA, 505 bp, Arabidopsis thaliana
ctagagcggccgccctttttttttttttttttagataaactcgtgtttagatagtaaaaactttgttctaaaatgttttcatgagacaaccgaaaaaaggtttcagaatcaaacaacaaacagtaaagtaaagaaagtctttccatgagagattcctacttccacagcttacgcagagacatgttcttctccgtgtctttcttcattaccttggccaccgccatctcaaagtcttcttgtgtcacgtgtactctcctctcacgcagagcaaacattcccgcctccgtgcacacagccttcagctcagcacctgaagcgccattcatcttctctgcaatctttttcagatcgattccacgcatcaaattcattttcctcgagtgaatcttcaagatgtcaaaacgtgactcttcattaggattaggaaattcaattttcctatcaattcttccaggcctgagaagagcttgatccagaatatcaatacgatttgtagccatcaaaa

SEQ ID NO: 329 - DNA, 505 bp, Arabidopsis thaliana
caaaaaaactaccgcgtgaggaagatcaagaaggctgcgtacgtttccatggccagagcagccggagggagtagccggctatggagcagagccctcttgcgtagagcagacaaagatgacaacaagatcgtaagattttcaaggaggaagaggaaggtgacgtggaagatatcatcaaaacggaggaggagtaaccagagagctccggtggtggaggaggcggcggagaggctgaggaatcttgttccgggaggcggaggaatggagacgtcaaagctgatggaagagacggctcattacatcaagtgccttagtatgcaggtcaaggtcatgcagtgtctcgttgatggcttatctcccaaatgatcatcaattaatcatcaacatcatcatcaatgatcgatgtatatagagatacgactcatacatagtctattggattggggtaatcataacgaatatatatgtgtatatatatatatatatatatatattcttatatata

SEQ ID NO: 330 - DNA, 505 bp, Arabidopsis thaliana
gaaaaaagttcaaatttttctaataaattttgatttcccattagtcagaaacatcttctttctcgtgcccggagctcaatttttcaaatttcattgaaaaatcgaagctttcctggaaaatttttgcattctctgttacatcgtcttcacctaattttccattaatgggtatctcaaaagacaggatcaaattcaacgttggtggacgactcttcgaaacgacggcgacgacgttagcaaacgcaggtcgtgattctttcttcggagcattgttcgacgacgaatggaatctttcaccacttgaagattccattcttttcgtagacagaaactcagattgcttcgcagttcttcttgatcttctccgtacgggagaccttaacgttccggccaacatccctgagcgtctccttcatagagaagcttctttctacggtttacttgaccatgtacggaccgctaaatggggtccgtttgatggtaaccgtcttcgtctatcggattc

SEQ ID NO: 331 - DNA, 505 bp, Arabidopsis thaliana
aaactcctccacactacacgtgtaaaccctttcttcttcttccccattaaatcctactatttttcttatttaccttagtggagacagaaccaaatcacacaatcagacaaaataaaaaggttccttctttataacttccgacggtgtccattatctgaatccgacaattcttgatgggttttggcgttttgagttgataaaccattctgagttgtgaatcagggatacaagagagagaggaaagtggttttacggtgaccggagagatgaacggagaagggatctctgatggtttgtcggctgagaggaaagtggaaattagagtgaggaagaatgggagaaaggataaggttatagttgagaaatctgctgctcaaggtttacctgaaggatggatcaagaaacttgaaataacaaatagatcaggccgtaaaaccagaagagatccattcttcattgaccctaaaagtgagtatatctttcaatccttcaaagacgcatcacg

SEQ ID NO: 332 - DNA, 505 bp, Arabidopsis thaliana
ttcgcggccgcaatcgtctttgtcgtcgttacctccacctccagaattccgaaatttctgggaatatcgattttgatttctatttcttcacgctctaatttactcgtctgctcggctgtttctctgtattggctgattcgaaatccggggtcaaaccgggtctgagctatctccaggttcggaatttacagattttatctggtctgatgggatcagagcctcggttcgagccgaggccggaactgattgacttgcctgttcttcagaaattcaagctctacgctactccctcgaatttttatttgattggaagagatgagaacaaaagctttaggaggattcttaagattgatagaagggaccaaaatgagttaaatttatttgaagatcctacaaggtatacaaaagacgaaatgcgcgaacttaaaagacggatgattgtagggaacgaggagtctggtggctttaaagcaatcacaacttgctatggaatcattgggtttgt

SEQ ID NO: 333 - DNA, 504 bp, Arabidopsis thaliana
atttaggcacatacagaaataatacctgtccccaattcaacaaaaataactggaacaagatattttgtaaggactaacgacaatacaaagaaagaacacatgacaaacttcattttaaactgagaactgagccatgaacatggacaaagtgacgaggtcatggatttggcatcccacacatatatagctaaaacatatggaccaatgcgaaagatagagagtaggtaaagtaatctgaagaagcttattcctcgaattcatgcatgtgatctagaagatagtttgcagccaactcttcattcttgttgcacgcaaagaacacttccaacaccaatgctctctcaaatcccatcgcttcaagccgttcaatggcttcacgttcctcatgtgtgacttgaatcgcctgtggctgtggcattcccgcagccatttggccaaggaggttgccactttctccccctccttcaacgggttcattgattaagcgtaagaagtcagcttggt

SEQ ID NO: 334 - DNA, 504 bp, Arabidopsis thaliana
taattattataaacaacatcaaagcatattacagtagatgaaaccatacatgcaaaccccatttattatattgaaaacatcatacaaagttacacacacgatgatgatgggtttaggtgagaaggattaggctttgagaacgtgggcgtccatgtcagcagcgagactcttgaccaacttcatgtagttgctgggttcaggcgagtcatcggctcgcttctcccaggtcatagtgatcttgcaaacgatatcatccggggacttttgaatgaactgtaaaatggtatcatacactttaagctgctccatcacgtgaccttctagtccaacgaacgttaccgccatgttttcatcgtctatctctctcctctccttgaacatctccggtttcccatctaatgtgtagttccaaatcttgatggctccatgggagtcccattcgccgtcgtggacggtgacaccttggatgtggtggccgatggcgtcggggaaaaggtggttctc

SEQ ID NO: 335 - DNA, 504 bp, Arabidopsis thaliana
cgcgccagaatcgagcggccgcccgggcaggttttacatcttcaaagcaaaagaaaaacatcaaatttttccaaatttttatcattttctcaatagtcagtactcagtatttagagtcacaaatctcgtcgaagaattttttttggaggaagcgttatttttgctaaaggtcaaacaaaacattggatttcgagaactgaagaacaagttttgatgggttctctaatgcaatctgaaccagagatggagaaaaaatcgatagggatacgattcttggaacgtatcaaaggctcaaagctctcttacagtgcttatcaagccatagtgttgatcgtgacgtttctcgcttacgctagctatcacgctgcaagaaaaacaacaagtattgtcaaaagtgctcttgatcctcaatctccagatacaggactaaactcacttcttttgagatttacttcgtttggttcctctgtaaaagaagaaggtggttgggctcctttcaatggt

SEQ ID NO: 336 - DNA, 504 bp, Arabidopsis thaliana
tatttcgaattaaaatacgtctccatgcacaaaatagataacataaacaattaaccagatcttgtccattaacaaaataacaagaagaagataacaaatctggtccatgtgtccacgtacactgtatctgacgtgtttttgagttgatgatccataattcgacccggttttgatcggttcaattcggttactcgaaagatagagacacacaacataaatagaaagttttattatcacggaataagccacaaaggagtaagaacaactttaattgtcttgatcacgaatctagccacaaatccagcttacactcttagggagccaaaatcagatccagatatcggaagtgcagtctccgccgggatatctcatctcgtgagctagtgcaggaccgtctggttcatcaccaaagtccacaaagaagtcagggtttagagtgagaccacctttgtctgtatcaacatcgatttgaattatgtgtgagcctttctcccggacgcgtgg

SEQ ID NO: 337 - DNA, 504 bp, Arabidopsis thaliana
attcagtggtcaactgaggcgattttactttacattggaggcgcactcgggttatttctgttttacacattaatcacaatcttaatcaagaataatggttcaacaatgttcaacctctcgttgctcacatcagacatgtgggctattttgatccgcacttttggttaccacgaaaaggttgattggctctacttcttggcatttgctactacagctactggactgatcatatactcaatgaaggagaaagatgaggaggaacaaagaagtggagaagtggtaagtgagaggaggaagctgttcgatgaggaggatggtgactcgctccacagcaaccttatagatgcttccacctgaaacctaatcaaatcaaagcctctggtttttacttgtctataacattgactgtgacttgtgggatatatgattattatttttcacacttttgggttggaggagtccacaagtttgtacatttctctcccaaactttggtaactgtaaa

SEQ ID NO: 338 - DNA, 504 bp, Arabidopsis thaliana
ccacgcgtccgacctcctgtcataacgataatgggccatgtggaccatggaaagaccactcttctggactatatcagaaaaagcaaggttgctgcgtcagaagcaggaggaattacacaaggaattggtgcatataaggtgtcagtgcctgttgatggaaagttgcagtcctgcgttttccttgatactcctggacatgaggcatttggtgcaatgagagctcgcggagcacgagtcactgacattgcaatcattgtggttgctgctgatgatggaattcgtcctcaaacaaatgaagcaatagctcacgcaaaggctgctgctgtaccaatagttatagctataaataagatagataaagaaggagctagtccagatagagtgaggcaagagctttcttcaattggtttgatgcctgaagattggggtggtgatgttccaatggttcagatcagtgctttgaaaggggaaaatgtcgatgatctgttggaaactgtcatgctt

SEQ ID NO: 339 - DNA, 504 bp, Arabidopsis thaliana
ccacgcgtccgcgtgtgtgtgtgtgtgtgtcaatggcggctttaagcatctcactagctttctctgttgattctctcaaaccaacccaatcaacgaagtttggcttctcgtcttcttcacatagatatccattactctactcgtgtaaatctcaccgctccaatctcagattcgctttccctccttcttcagtttcgacagctacagaaactggagaagaaaactctaaatcgaccgggaattacgcgtttctagaggaatcgtttcgtaccgggaggtttttgagtaacgatgagttagagaagcttaaaactcttgaaggatttgcgtattttcaagagcttgaatctggatcgatgtgggttcgagttatgagacatgaagagatggattcaacggtgcatctattggctgagtcatttggtgaatcgatgttattaccttctggttatcagtctgtgttacggtttttgattaagcagtatttgattgagagaagagaag

SEQ ID NO: 340 - DNA, 504 bp, Arabidopsis thaliana
ttcgcggccgcagtgtattttgcaagtaatcaacatttattagattgatcacactcacacatgtgacattacccattattagattgatcacactcaacacaattctgaattctgttccgatttccatagaaatccttgatttagcgaaaaaactaaacccagatatctgaggtgcagtcgccacccggatatctcatctcgtgagcgagcgaaggaccatccggttcggtcccaaagtcgacgaagaagttagggtttatggagagaccacctttatctgtatcaacatctatctgcaacatgtgtgaccctttctccacaagttccgggtaaaactgtctgtcccaaacactaaacagcgagttcgtcacgtacaatcgcttcccatctaggctcagctgaaacatctgaggacctcctcttagacgctgacccttgatcttagggacatcaaactgaaatgcttttccttcttctcctaaggccaagacaagacttcccttt

SEQ ID NO: 341 - DNA, 504 bp, Arabidopsis thaliana
aggagaatctgagagagagagagtcatggaagctctgaaaaccgcaacttttagccctatgtcggtgttatccgagaaaagatcagaaccacgaaagcctttctcgctccctaacctctttccaccaaaatcacagagaccaatctcccaagaaagcttcttgaagagattcaatggtggattggctcttctaacttctgttctaagcagtgcaacagctcctgctaaatccctgacgtacgaggaagctctgcaacaatctatgaccacttcttcatcttttgattcggatggtctgattgaagggatatccaattttgtcacagacaatcctttggttattgccggtggagttgctgcattggctgttccatttgttctgtctcaggttctgaacaagaagcccaaatcatggggagttgagtctgctaagaatgcttataccaagttgggtactgatgataatgctcagttgcttgacataagagctactgctgatttcag

SEQ ID NO: 342 - DNA, 504 bp, Arabidopsis thaliana
cttttttttttttttttttttaacaatcgacaatacataatagctgcattgtcacccgatacttaaataattgtctcatacaaataaaagattgaagacattcaaacaatatttatatgtgaagacaaaaaaaaaccaaaaaaatgaaccaaggaccaaatataatatgatatttttttgcttagggacaaaaaaaaacagcatcatcacaagcatcctaaagaaaatagaagagataaaacagagatataaaactaaagtacacaagacttcttgacacaaccataaggttctaaagagaaaaaagaaaataaaatccacataacaacagatagttcaattcccatctcaactagggaaaatagatttttttgtaacaaactcaccaccacgaaccagataagacaagacacacttagaaacatttcctgtgaacaatcgatggacctgactcatcgtactcactctttgaaatccacatctgttggaaggtgctgagggatg

SEQ ID NO: 343 - DNA, 504 bp, Arabidopsis thaliana
  misc_feature (1)...(504): n = A,T,C or G
aacagcacgacggtctccctaactgctttcagaaaccgttcaacaactgttcctgagttgggctcacttggtgcaatatacactttcagtctcacatgggctgagatccagaccttgactcctgctatttcaaacccctacagagtaaccagcctgtttaggaatccaaaacagaaaaatgctgggaagcttttctcactttctgatttcctaagcttggcaaaaaactccacctctctctccggtgttttgatcagtgtagagaatgcggcatacctgagagaggagcaagggctcgacgttgtcaaagctgttcttgatacactcacacagactggctacagcaatagtacagccacaaaggtcatgattcagtcaacaaacagctcggttctagttgacttcaagnngcagagccagtacgagactgtctacaaannnnaagaaaacatccgtgatattctcgactctgctattgaagacataaagaaattcgctgatgct

SEQ ID NO: 344 - DNA, 504 bp, Arabidopsis thaliana
cgcaaacttgaaccgtcgtaaccctaaatcgccatcttcatcatcggcaaatcgaatctccgattatatatcaaatagcttaccaaatccgacatgacccaggccctcgttttcggaggactataatgatcggactcttcgtgtcccgtctcgattgcatggggtttgagctatgccggagcttcgccgtggagtccgccgtggccgtgttactgatgctgtagctcccaatcagcttccgcaaacacctacagaaaagaaaccgaagaagagtaccgttaaagctccaaaaccggttgccggcggagttacaggagttgcagagagcccgaggactagattagcggcgaggaaattaaaggaggaagataaagagatacctcaggagattccggttgttgtgccgtctaaggatagcgatatcgataaaaacaagggtaaagaggtagtcgttgaagaagagaagaaagatatggctattggtaatgatagtggtggctctaa

SEQ ID NO: 345 - DNA, 504 bp, Arabidopsis thaliana
ggttctcaacgagagtcttttgacagcaacatgaacaaagagactttaagtcaactcgaaaaccctctggttagaagacggttaggagatacttctagtctctctatccctgcaaagaagcagaaatcaagtggaccaagctctagacagtggcctatgtttcaacgagctggtggcgtcaatatccaaactgaaaataatgatggcgcgatacaggagtttcatttcagatctagtcaacctcattgtagtacagttgcctgcccttttacttcagtgagtgagcagttggaagagaaatggtatgcgagccctgaggagctcaggggtgacatgcgttcagcctcttcaaacatctatagtttgggtattcttctttatgagttgctgagccaatttcagtgtgaaagagctcgtgaggctgcaatgtctgatatccgacaccgcattcttcctcccaaatttctgtcggagaatccaaaggaagctgggttttgtctttgg

SEQ ID NO: 346 - DNA, 504 bp, Arabidopsis thaliana
ttttttttactccaagccgtgtaaaagtcgccataaaaacaaacacccaattgaaatagctcaagtacaatgatacataaacacaataaaccacaaaaacagagaaataaaaaagtgagcagataattggtttgtggaatgaagacagaaacagagtaggtaaaatttaagcttgaggtttgtcccacttgagtggcttgacgacttcccaggtgaagtcagggtcgtctcttccaaagtgtccgtaagccgcagttttcaagaaccttccgtttcctcctctctttaggtcaaggttaattgtcatcattcctggtctgaagtcgaagctctccttcacaatctttagtatctccttgtctggaatcaatccagtctcataagtgtccacaaagacagacaatggctcagggactccaatggcgtatgagacctgaacaagagccctacgagccatcccgttagccacaacgctcttagctgcttgtctcacaatgtaggctc

SEQ ID NO: 347 - DNA, 504 bp, Arabidopsis thaliana
tgatggaaatttttattcaatcttatagaattgcttattttatttttaaacataaaaaagaagactgcaattttttattactgtctgtatcgtgttatataattttcgtttttttatcgtcggataaaatataaagataaagaaagtttttttattcttcgtctacgaatatccaaatttttattcctaaaaccccataaatagttcgaactgtataggaacaataatcaattttagcttcaattgtttgtaaaggaactctgccttctctgatccattcaacacgtgcaatttcttttccgtcgatacgtcctgcaatttgtacttgaattccttttgtattcgcctgttcagttaattcaatagcttttttcattgcttttcgaaaagaaacgcgattttttaattgtccagcgataaattctgcaagaatattaggatccccatacggattggaaattctggtaatagcaatgttgagttttctattgacacaatttagtt

SEQ ID NO: 348 - DNA, 504 bp, Arabidopsis thaliana
cctctagagcggccgcccttttttttttttttttttcgagactaaatcctgatatttcaaacataataatctcttgtacaaaaaactggacagcttttaactgtgcgatttggagagtgactcgaatctcctttaaagagtacaacagacgttctaaacatatggaaaaaaatgtcgtcatagaaaacactaaaacaaacggagcgagagatagttgtgaacccccatcacccttcgaacacctacaaggttgaaatctgaagagcttctttcctgagggacgtgctacttgtttaagaaggcatgtaggttgaagtatcaatctgctccggaagttcctttatatcaacctcaaacctctcttgtacctggttaagaacctctgaatctgaagcagatgcaacaaatgtgattgcaagacccttggttccaaatctaccagctctgccaaccctgtgaagataggtatcagcagaatctggcatgtcatagttgatgacaatg

SEQ ID NO: 349 - DNA, 504 bp, Arabidopsis thaliana
cgtcgtggtagacaatggagaagccagccgactaatgtctctgagatccctcctcttctgagctctgaggttcacaaaattcataactacgagaagaaagatcataaacaccgacataataaaaggtctccatctccgcaggctcaatctcagaggaaaaggtctagaactgacgactcacggaatgaacagacattctcagtgtaaagttttggtcagagggcatctttgcgttctgctttgtatgagactaacaagtcagacagggaagctaaacctgatgtctctcgccggctgcttcagtttgctgtgcgagatgctctagctatatcaaggccggcaaatagttcgactgaatcctcattaaaacgtcttcgttcagtggtgtccacatctactcaaaactcatctgaccctgatccagctcggaaaattcgatctgttgctagggttgtgaatcccatggctactgttatgaaagctgtcgccgaagcagccgaagat

SEQ ID NO: 350 - DNA, 504 bp, Arabidopsis thaliana
attcgcggccgcggaatacaatattaataacatttcttacaatctccatcaaaacatttgctcttccctcgaccatcaatctttaacaagacaatacgtggaacaatatttttttccagagcactgaatagctactttgtgtggacaacgcttctcacaaacgaagcaaatgtgtcgagtcatatgaccattgtttggtagaacgtatacctttttaccggagaagaaccaccacgaataaggtttcatggtcatagcaaatatacattcaatgtggagggtgacacaacaatcctcctcacacgtataaaatcgctcttttggatttaagtatccctcgcaaacttcacaccaataagccatggtacttgtcttgttcccataagaaagagtgagcatatgcttatcatgcttatacctcaacttttgaggtaaagtagcacatccaaaacacaaagcaaaatcacactcttcaatgcaattgaatgtttcttttgtggaaag

SEQ ID NO: 351 - DNA, 504 bp, Arabidopsis thaliana
caagcaagcagtttgggcaagaggaaataatttgctctttagttactgacgcatgtattcaagtctgcccaaagaatccaacgaatttcaatgtggataatgttcgtgtttccaagcttttgggaggaggcttgcacaattcttgcatagtccgtggtatggtcttgaaaagtgatgctgttggtagcattaagcgaatggagaaagcgaaggttgctgtatttgctggtggcgttgataccactgcaacagagaccaaaggaactgtcctcattcatagtgctgagcagctagagaactatgcaaagacagaggaagctaaagttgaggagttgattaaagcagttgcggaatcaggagccaaagtcattgttagtggaggatcaattggagaaatggcattgcatttctgtgagcgctacaagataatggtattgaaaatcagctcaaagtttgaactgaggcgtttttgccgtacagcgggggctgtcgcccatttgaagc

SEQ ID NO: 352 - DNA, 504 bp, Arabidopsis thaliana
ctttggatccagattctcctcctttttatgtaggtaacacgcatatcaagtgttaaagagtcaagatcacaaaaagttctatcgggtgatctgggctgctttcttttgtaatctaattgcagaaactttgctctgacttggatagcttcgtaaaaggttcaatctttctccgtttttcatcaatgagtagtaactaatctggaaatttgttgggagagaaagggcacattgcactgctattgctagagaacgtttctgcatccatgctggtagagagcatgcgtggatactgtgttttgggtgatgcccctgacaaaattagttcccgatgcattcggcgttgtgacgatatgtctagtcgctctgctagttcttttgggtctcctttgcatcgcttactcgttctatttccagtctcacgttcgtaagcaaggctatattcaacttggttacttcagtggtccctggattatccgaatcactttcattctctttgctatctgg

SEQ ID NO: 353 - DNA, 504 bp, Arabidopsis thaliana
atgttcagcgcctgctggtggacttgcttcagtttcttgagccatttttaagaaatgctgaactcggaggaccggttcatttcctatacaaagggacattgagagtattactggttctgcttcatgatttcccagagttcctatgtgattatcattttactttctgtgatgtgattccttcaagttgcatacaaatgcggaatattatcctcagttcttttccacggaacatgaggcttcctgatccttctaccccaaatttaaagattgatttgttacctgagatagtagaagctccctgtatcctttctgaggttgatgctgcgctaaaggcaaagcaaatgaagaatgacgtggatgagtatcttacgtcgaggcagcaaaattcaactttcctaagtgagttgaagacaaagttacttctatcgtccagcgaggctagttcagctggaacccgttacagtgtaccattgatcaactcgcttgtgctatatactggaatgc

SEQ ID NO: 354 - DNA, 503 bp, Arabidopsis thaliana
gccgcccgggcaggtactgcgccggagattctgcgcagccaccacggcctgctctgttcctctgaacgggaacaagaagaaaaagtctgaaaaggagaaggtgattgtgatttctgggcccaccggcgcaggaaagagcagacttgccatggagctcgctaagcgactcaatggtgaaatcatcagtgctgactccgttcaggtgtataaaggccttgatgttggatcagccaagccatcagatagcgatagaaaggtatctttctgaaatatttggtggtgcctcatcatcttatcgacattttgcatccgtctcaagactactctgtggggcaattttatgatgatggaaggcaagctaccaaagatattcttaatagagggcgtgttcccattgttacgggtggaactggattgtatctgcgatggtttatgtatgggaagccggatgtgcctaaaccttctccagaagttatcgctgaggcccatgatatgctagttgg

SEQ ID NO: 355 - DNA, 503 bp, Arabidopsis thaliana
tcactgcacaaggcatgcgtgcattatccaacttggttaacttgaagaagctagatcttgagaagtgtcctgggattgacggtgggcttgttcacctgcgagctttaaccaagctagagtccttgaacataaagtggtgtaactgcataactgatgcagacatggagcctctttcagtacttacaaatctgaggagcttacagatttgctgcagtaagattaccgatatcggtattagctaccttaaagggctaaacaagcttaatttattgaacttggaggggtgccgtcatgttactgctgcatgcttggacacactcacagctcttgcagggttgatgtatttgaacctcaatagatgtaatttttcagacagcgggtgtgaaaagttttctgatttaattaatttgaagatactaaacttgggcatgaacaacattacaaattcatgcttggtccacctgaaaggtttgacaaagttggaaagcttgaatttggattct

SEQ ID NO: 356 - DNA, 503 bp, Arabidopsis thaliana
ctctgtagaagcgtgagagagatcacgcgtattcaccgacacaatcaaaatatggcgaacggagccgatagattggatctggacggtaaaccgattaagccgatgacgatatgcatgatcggtgccggaggtttcattggctctcatctctgtgagaagcttatgacggagactcctcacaaggttcttgcgcttgatgtttacaatgataagatcaagcacttgcttgagcctgataccgttcaatgggctggtcggatccagtttcatcgtatcaacattaagcatgattctagactcgaaggactgatcaagatggcagatctgacgataaatctagctgcgatctgtactcccgcagattacaatacgcgtcctcttgacactatctacagcaatttcattgatgctctcccagtggttaagtactgctcagagaacaacaagcgtctgattcacttttccacttgtgaagtgtatggaaaaactataggaagctttct

SEQ ID NO: 357 - DNA, 503 bp, Arabidopsis thaliana
  misc_feature (1)...(503): n = A,T,C or G
ccgctacacacatctcacatccccctatctctctctctcttcaaacgttttagttccccaaaaaaatatcaaaagaactaaaagaaaaaccctagaagccgaagaatctcctactcgttgtcgatcggatcacctaactaattactcgttgataatcattatatcgagaaatatgattaattttgaggccacggagctgagattagggctaccgggtgggaatcacggaggagaaatggctggaaaaaataatggtaaaagaggattttctgagactgttgatctcaaactgaatctttcatcgacggctatggattcagtttccaaagtcgatttagagaatatgaaggagaaggtcgtaaaaccaccagccaaggcacaagttgtgggatggccaccggtacgatctttccgcaagaacgtcatgtccggcnaaaaaccgaccaccggagatgccaccgaaggaaacgataagacttctggcagcagtggagccacctcat

SEQ ID NO: 358 - DNA, 503 bp, Arabidopsis thaliana
  misc_feature (1)...(503): n = A,T,C or G
gttgaaaccattagtaaagaaatcataaagccatcttcgccaactccaaataatctccaaactctccaactctcaatttacgatcacatccttcctccagtttacacagtagcctttctcttctacaccaaaaatgatttgatctctcaagaacacacttcccacaaactcaagacttctctgtctgaaaccctgaccaagttctaccctcttgccggaagaatcaccggagtaaccgtcgattgtaccgatgaaggagctatctttgtcgatgctcgtgtcaataactgtcctctcactgaatttctccagtgccctgatttcgacgccctccaacagttgcttcctctgaacgtagtggacaacccatacttggctgctnncacgtggcctttgctgctcgtgaaggcaacttacttcccatgcggaggcatggccataggaatctgcatcactcacaaaatcgcggacgcagcctccatctcgactttcattcggtcctg

SEQ ID NO: 359 - DNA, 503 bp, Arabidopsis thaliana
  misc_feature (1)...(503): n = A,T,C or G
tccacagacaagcaaccactactcgagactcctggtgaggtttttgaactgcggaaacttcttccgatgtccgttgcttatgacttcaacatccatactatggattttcagcctggagagtttctgaatgttaaggaagttcattataaccagcatggtttgttgcttctggaggggcaaggcatttatcgcttgggtgataactggtatccagttcaggctggtgatgtcatatggatggctccttttgtccctcaatggtatgctgcactcggaaagactaggtctcggtatttgttgtacaaagatgtgaatcgaaatccattgtgatcaaagattgatatgactttgcagtaaaagtcagaatcttgttgttcagcttcttgtcttataaacgccatgtccactctaagcactagctacgtgagacttagttgtatgaatcttannncaattgtgaaaagaaacacattgataaatgatgaaatgactctctctctctc

SEQ ID NO: 360 - DNA, 503 bp, Arabidopsis thaliana
  misc_feature (1)...(503): n = A,T,C or G
taaccaacaaagaaccatggagctcctctctagagctcttttcttctttcttctactctcagttctttcttctttctcttcttcaagtttcatttcagatggggtcttcgaatctcagagtttggttcttggcagaaacttgcttcagaccaagaaaacatgtcctgtgaactttgagtttatgaactacacgatcataaccagcaaatgcaaaggtcccaaatacccaccaaaagaatgttgtggcgccttcaaggactttgcgtgtccttacactgaccagctcaacgacctgagctcggattgtgcaaccactatgttcagttacatcaatctctatggaaaatacccgcctggacttttcgctaaccagtgcaaagaaggtaaagaaggtctcgaatgccctgccggatcccagttgcctccagagacatcagcagannnaaacgcagcaactacctcgtcgtcccgtctttggctgaccgtttccgcggctcttttgg

SEQ ID NO: 361 - DNA, 503 bp, Arabidopsis thaliana
cccgggcaggtacctttgtgacaacaagttccatactgaggcattgaacgagcttcttgagtctgatgacaagtttggtttcattgttatggatggtaatgggacactgtttggaactttgagtgggaatactagagaggttcttcataagtttactgttgatctcccgaagaagcacggaagaggaggacagtctgcacttcgttttgcccgtcttaggatggagaagagacacaattatgttaggaaaaccgctgagcttgctacacagttttacatcaatccagctacgagtcagcctaatgtctctggtctgatccttgctggttcagctgatttcaaaactgagctcagtcaatcagagttgtttgatcctcgtcttcaagctaagatattgaatgttgttgatgtttcttacggaggtgaaaacggtttcaaccaagcgattgagctgtctgctgagattctatccaatgtgaagttcatacaggagaagaaactga

SEQ ID NO: 362 - DNA, 503 bp, Arabidopsis thaliana
ttttttttttttttttttttttttttttttttttttttttttttttttttgaaagaacaaaccgctaaggcgatttttttcattgcaatcaaactgatgtttttgttgattcatcaaagtaaggttattacgaatcaaaaataactttaaaaggtacaaaacaaatctcgaaatcgaatgtttcctcttcgccggtggttttctcggagatcaagcaaagacagagaagatatcaccattgatgtaattgttgtccactaagcttaccaaatagtagctgttcttcacctcctcgagcaactttctagaagggtcatcttctgggtacaagttagcccagcttcttgaccaaatctcaaacgcttcgtctttccagactttgaaactggctggatccacgatcgtcggttgaataacctccttagctgggaacactccccaagtaactgcattcacatcggactcaccggtgtttgatacccaattctctgatttgttcacgg

SEQ ID NO: 363 - DNA, 503 bp, Arabidopsis thaliana
cggccgcagctttgtctgttttggtttttaattttgagaccatgatacgcctaatattctgataaacaaaaacccaaatcatgcctgctggctcaattcaacaacaaaagaagcaaactaagcgtaaaacagaattcaaccacatcataagagggttgaagatacgcaacgcagtgttgtgttgtgaaaagttcaagaatctggaaaacaccatcaagaaagacatagattaaaaattacacattcgagtaacaaacaacgacacttactgtcttcacttcaagattcaggatgcagcaagagtcgtttctcttctcacagaggatttagttctcatcttgaggctcatcagcacctttggttctctcatctccttcctcattaaggtctgaagtccacaaggtgagattgtctctaagtagctgcataataagagtgctgtctttgtatgattcctcgttgaggctgtcaagttcagcaattgcatcatcgaatgcttgctt

SEQ ID NO: 364 - DNA, 503 bp, Arabidopsis thaliana
gcctcgcaatctcaacgagaaagccaagaacacaacgcaaaagaccaaaccagacttacaacgaagcagctactcttctctctactgcttatcccaacatcttctcctcaaacttgtcctctaagcaaaaaactcactcttcatcaaactctcacttctacgggccattgcttagtgacaacgacgacgcttctgatttgcttcttccttatgaatcaatcgaagaacctgattttctgtttcatccaacgattcaaacgaaaacagagtttttctcagaccagaaggaagttaactccggtggagattgctacggtggtgaaatcgaaaagtttgatttctccgacgaattcgatgctgaatcgattctcgatgaggatattgaagaaggaatcgatagtataatggggactgtggtggaatcgaattcaaattcggggatttatgaatctagggttccgggaatgatcaatcgcggtggaagaagttcttctaatcggatt

SEQ ID NO: 365 - DNA, 503 bp, Arabidopsis thaliana
ccacgcgtccgttgggatcttggaaagggctgcaaccatgttccgtaaggagaaagatcccacagcgccagagcttccaaagacattgaagaaactggacctgcaatgttttcctggtgaacatcttcctgaatggcttgagcctgataatctacttaatgtggaaaaactctacattaaaggaggaatcaaacttactggatttggaaagtcactacctagccagaattcgaaatgcaaagttaccgttttacgtctgaagtttcttccaaaactaaaagtggagtggagggatttgagcaaaaggtactttccggaactcaagttcttggagaagtatcagtgccctcaagttagtctctgcccctgcgatggaattggaatctggcgcaagcctgaagaagatgaagtctaaagcatctcagaactgagagtttctcggtttatcaagttttcttcctcgttgtctttttcttttgttgttgttgttgttgtgtgttgct

SEQ ID NO: 366 - DNA, 503 bp, Arabidopsis thaliana
ccacgcgtccgaaaaccactgaactctcaaggcgtgaaagagaggagctagagaagcagcgagctcatgagcgatacatgaggttgcaagagcaaggcaaaaccgaacaagcaaggaaggacttggatcgtttggctctgattcgccaacagagagaagaagctgccaagaagcgagaagaggaaaaagccgcaagagacgctaagaaagtcgaagggcgcaaatgagaagtgatcacactcaaaagacctgcctactatgcgattaagatgtgttgtttttactttgttctttttcgattgataaaagataaaacctctgctatttactctgttatctctcgattttaagttcggtttaaaaggattggatgtagttcaaaatataaactcgtttaagatttatgcgtggaagcttcctcagtactgacaaaaaaaaaaaaaaaaaaaaaaaaaaaaaaaaaaaaaaaaaaaaaaaaaaaaaaaaaaaaaaaaaaaaaaaaa

SEQ ID NO: 367 - DNA, 503 bp, Arabidopsis thaliana
ccacgcgtccggcaagatatctggatacgcggaaaatagagagaagaaatcaaaaagcatatttttattttatctttgaaaagaagattattgtttttagtctacaatggtgactctaaaaatggagatttgcatcgagttgttgaaattgaccgtagatttcgtcgccgccgttgcagaatcaatcgaagtagctttccgccatcgtcctccaccggtgattcaatattcttcagtgatgtatggtcgccggagtaattacaccgccgttcccattcctctcgtggggtttctgtagttaatatattcttcttttgtggttcttttgttttttgttcattcttgttctattataattaccttcttgcctcggacaaaaaggtatatttcttatgaaagaacaagatgtgttttgtgtataaaccaaaaaaatcacgaaaagtttacgtaacccgtgaatatataaaagtttagacgttcccgattgtaaaaaaaaaaaaaaa

SEQ ID NO: 368 - DNA, 503 bp, Arabidopsis thaliana
ttttttttttttgattagacgaagcgtataatagatagatcataaagtcttatgattaggaaaaggattttgaacaacattctaaatcaccaaatacatagaaactaagatccaaaagcttcaaatttctacattcaccagagctcaaacacaaactagcaacgaaaactctagcagattaagctttctttggagacttgactggtgatttggtagccttttcttcagctggtttagtggcagacttcttaggcaatagaacagagttgatgttaggcaaaacaccaccgtgagcgattgtgacaccactcagaagtttccccaattcttcatcgttccttatcgcgagaagaagatgcctcggaattatccttgatttcttgttatctctcgcagcgttaccagcaagctccagaacttctgcggcgaggtattcaagaacggcggccatgtaaaccggagcaccaccaccaagtctctgagcgtatcgtcctttcttcagg

SEQ ID NO: 369 - DNA, 503 bp, Arabidopsis thaliana
tttttttttttttttttttttttttttttttttttttttaagcaaaacatacagtaattttatataaaaaaatcataactgtatgagtaatctttgtgacgttacaaaatactaattttaatttttttgatagtatgactaatctatgttatattaaggttttacctccccgccacattcatttcagaaacttttagctatagacattccaacaaatttattttatactattgttcattaatcataagtactagttaaatcatgttttggtcttttgaagctaaacgatttgactaattcgaagcaaaaaagtgaatgtgctttatccactactgactgatacgagaagtcgaagaaactctggtgattgaggtcgacgaaacatatcctaccaacttggatccgaattcgcttcttgaagactttgaatatccccactcatcgtcaatctcaggtacattctcctctccgtttagatacctaagcacgattctcatcgacgg

SEQ ID NO: 370 - DNA, 503 bp, Arabidopsis thaliana
ggtcgcggccgaggtacaaaccctctccaaaacacacccacacgtacgcacacacacaaagacaatgtctcctttcaaaatattcttcttcacgactcttctcgtggcggcgttttcagtgtcggctgctgatttcaacactgacgtcaacgtagcttggggaaatggccgtgggaagatactcaacaacggccagcttcttactctctccttagacaaatcctctggttccggttttcaatccaaaacagagtatttgtttggaaagattgatatgcagattaagcttgttcctggtaactctgcaggaacagtcacaactttttacctaaaatccgaaggatccacttgggatgagattgattttgagttcttgggtaatatgagtggagatccttatactttacacactaatgtttacactcaaggtaaaggtgacaaagagcaacaattccatctctggttcgacccaaccgccaatacctgcccgggcggccgctcga

SEQ ID NO: 371 - DNA, 503 bp, Arabidopsis thaliana
ctttttttttttttttttttttgtggaaatcattgatttaactgaatatattcttactggaaatgtaacaaaacagtaacatatacaaagatcataacttgagttctaagcggtagtattgatggtttcaaaaagggtacaactgtacggcttcatctcatacacaaccagttgctgcaacggttcttctgctacaacggtttctccttcgacagagaaaaaccccgggaaaggaagagctgtgtcgaccaatcttctccatttgcttccatcgggaagtgaaggtaagactacactctcaggatgatcactcgcattgaatccgatgaacagatcattgctctttggctcatttggctcagccaatgacgcagtttcctcttcctctgactctgatttgatctccaatgccaaaaacttagaagcaggatcttcccactttggagttgtttggtcatttgcataccaaacaatattttcaggtttcaaaaagtctctccttt

SEQ ID NO: 372 - DNA, 503 bp, Arabidopsis thaliana
ttttttttttttttttttttttttttttttttcctttttttttttttttaaatcaagacgcacggatatataaattacatattcataaatcagacatttgacaatccgatagaaattgtctcataaagagaaaaagaacacagacaataggaaatgaaatgagcagagataattcataagaatgttttagaaaagaaattaagcttcggtgaagcttgggggcttgtaggcaatgaaactgatgcattggacttgacgggtgttgtcgaatccgatgatcctaatgaaggcgcccgggtactccttcttgcattcttcaacttccttcaacacttgagcggagtcggtgcatccgaacaatggaagcttccacattgtccagtaccgtccatcgtagtatccgggagtgtttccgtgctcacggtacacaaatccgtgctctaactcgaattcaacacaaggaatccacttgttgcggagaaggtagtcaacttccttagcca

SEQ ID NO: 373 - DNA, 503 bp, Arabidopsis thaliana
cttttttttttttttttgtatataaagtatggatcactataactcatatcagcacaaaacaattaattttgacatgtacttacaagtggatgcatgaaaaagtttcaatacaaaaatctcaagcggacgcaagaatgtcgagggcaacttccttaagagaaggcatggattcttgctgatgaacacaaatgtatttgttccttgttctcctcagtacttgccatggacctggataacatctgaaaagtacacctcctttctgtcctttgaaattgtggatgtagtacactgtctccatctttggaagaagtgtcttggtaagtgcagccagtttcggataaaagaactttggatagtaacccgatcgtatgcggtcaagttctccattgaagatgattagttttcggtcagtgttcacaacagcttccttgtagagctcttccactacaagcatctcgttgacattaaaatacgggtatgcgacaagaaacacggacgcgtgg

SEQ ID NO: 374 - DNA, 503 bp, Arabidopsis thaliana
ttacaggccaaagttaccaaagcatacacatgatcttaaaagtaatcgtttcttatttcttttttgattgcaagacccaaagagattatcatttgttgtctcaccctaaccaaatcaagccaaatctacaatccccccactctagttagagcagcaacccattctcttaagaaccgatccgtcttctttaacgtttatcgtctctccttttcccggtaaatcagccgactctcctcctccatcaacacttcttttgctcactatcttgtggatctgagtgagcacttccgtgaatgcgttttcaacattggttgcgtctagagctgaagtctccatgaaatagagggattctctctcagcaaaggctttagcctcttctgttttgactgccaccaagtgacgcagatcgcacttgttccctataagcatcaccactatgtttgggtctgtgtgtcctcttagttcccttagccatcttgctgcattctcaaatgttgcgtgcc

SEQ ID NO: 375 - DNA, 503 bp, Arabidopsis thaliana
  misc_feature (1)...(503): n = A,T,C or G
ttttttttttaacaataaaacagcctttaccttccccaaagtttgaaaccaataaatgaaagaagaagaagaagcagaaattaaaagttattataaggagtgaccaaatgcagaagaagaagaagaagagtaaatttcaaatctgaggtaatctactcatgatctggttatataccgattgtcctgaatctgaaaccggttcaacctttggttccatccctctctgcatcattgcttcactcatcccaaccggttgtgtcatatacgggtgaggcaaacccggcattttcccttgaccatacgctaaaccaggcattgaaagattaaccaaaccggtttgtcctaaaccgannnngaaaccagaaggaggacccaaatgtggctgaaagctaaagggacggctaaaaggagactgattgttagttgtgacttgtctgtcgaatctcccacgtggcggctctgagtgatgaccgttgtggtaatggtgagaaactgcggctgaa

SEQ ID NO: 376 - DNA, 503 bp, Arabidopsis thaliana
ccacgcgtccggcccttgatgcaacttgatgagccacacaacgctaacttcatggccaagtctgccactcgaatggctattctaggagtccccttaagtttactgggtcaaccaagcatgaattttgcttcatcaagtagcaagggtgatacacttgtagcactaggctctccctttggaatcctttcacctgttaacttttttaacagcgtatcaactggttccattgcgaatagctatccttctggatccctaaagaagtcactgatcatagctgatgttcgatgtctccctggaatggaaggggctccggtgtttgataagaatgggcacttaattggcattttgattagaccactaaggcaaaagaatagcggcgttgaaattcagctggtggttccatggggagcaatcacaactgcttgcagccacttgctgcttgaggaaccatctgtagaaggaaaagcaagtcagtgggggagtgaagttctaagtgttaaatc

SEQ ID NO: 377 - DNA, 503 bp, Arabidopsis thaliana
cggccgcctctaaagacatacacaagaacagaagaatatctctcactttgaagcatctccttttcattctgtcagtaacaaacaaagatattgcaatgcaaaaatcttttaaggcaatatttctcttattttattatacattgacaagaattagagttacaacagtttgatacatacatacatagtacctcctttggtcatattctttttgttgttgcggctccacaaaatcttaacccatctcgtgaggaaagattgtggcctgtggcaatctcattttctgagagcatctgatgtgagaagtcccatctgttcagtaagatggttcatttgttgattcttgctccacacattactcagggttgattgtaactctagttgctccaatatcagttcattttccactgatcctgagattaactcatctgtctcaccaatcactgggctctcaccaatgaactgttcccaaaaagaatcttggacttcaggaagcaactcattta

SEQ ID NO: 378 - DNA, 503 bp, Arabidopsis thaliana
  misc_feature (1)...(503): n = A,T,C or G
cttgactgaggatatatatttcctagacacccatgctgaagtttttgtctgggttggtcaatgtgtggagcctaaggaaaagcaaactgtatttgagattggccaaaaatacatagatcttgctggatccttggaaggcttgcatcctaaagtcccaatctacaaaatcaatgaagggaacgaaccatgcttcttcaccacttacttttcttgggatgccactaaagctatcgtacaaggaaattcattccagaaaaaggcatcgttgttatttggcactcaccacgttgtggaggataagtctaacggtgggaaccaaggactaaggcaaagggctgaagcactagctgccttaaattcggcatttaactcttctagtaacaggcctgcctattcgagccaggacagattaaacgaaagtcacgacggcccnngacagagagctgaagctttagccgccttgtcatccgcattcaactcttcttcgtcatcaactaaatcgc

SEQ ID NO: 379 - DNA, 502 bp, Arabidopsis thaliana
  misc_feature (1)...(502): n = A,T,C or G
taggtctaaggaagaactacataaatcaacaaattgatgaagcattaccacattcactgaaatgtcgcaaatatactgatgcacaagaatcaattgacgcagatatatcatgaaactcagagatacatagatgcaaattcaaaaacctaaaaactaatttcatcaatccgcacgaatcggagagaaactccaattttaaacttcaatcgaaggtaagagagagagaaggagatcggaaaatgactaacggtgagacgaagaagacgacgtttcgcagtggaatgagtgatgtattgagcggtgacatcgccaaatccccaaagaaatccagaactgatgacctgagttttcacaggatgaaccgtcaggcatcgctggtaccatctccaaagcttcaacattatgtaccagccgtcttcgccgtcgcagcgcgagagagagattgggacntgacacctgtgacggagagccgccgtggaagaaggcgattgcggacgcgtgg

SEQ ID NO: 380 - DNA, 502 bp, Arabidopsis thaliana
  misc_feature (1)...(502): n = A,T,C or G
ggccgcccgggcaggtacagatgatgacctgcctccatctcatcaaggtanntatcaaagaaacgccagacctaccgggaatggaannnntcagttctcaattctgctcctttatcacgggtgcacaatgaaatggaaactcaaattcatctcattgagcaagaagcttatagctcgatactccgcgcatttaaagcccagtccgatgctattacctgggagaaagaaagtttgatcactgaactcagaaaagaacttcgagtgtctgatgaggaacacagagagctgttatcaagggttaacgctgatgaaatgatcaggcgaataagggaatggnnaaaggcaaacagccttcagtctagtgttcctcagctggttcatgatgctccgagtccggctgtatcaggatcacgtaagaagcaaaagacatcacaatcaatcgcctcattagcgatgggcccaccatctccttctttgcacccttcaatgcaaccatcgtcat

SEQ ID NO: 381 - DNA, 502 bp, Arabidopsis thaliana
atttctctatttttcgaattttaaatgaacgatttgttttccagctcattctctcgcttccgcagcggagaaccatcccctcgccgagacgttgccggcggtggcgacggagttcagatggcgaatcccgcgggatcaaccggtggtgtgaacctcgacaagttcttcgaagatgttgaatctgtgaaagaagagctaaaggagctagatcggctcaacgaaacactctcttcatgtcacgagcagagcaagacgcttcacaatgctaaagccgttaaagatctccggtctaaaatggacggtgacgttggagtcgcgttgaagaaggcgaagatgattaaagttaaactcgaggcgctagatcgtgccaatgctgctaatcggagtctccccggctgtggacctggttcttcctccgatcgaaccaggacctctgtcctcaatggtctcaggaagaaattgatggactctatggatagtttcaaccgattgagggagctta

SEQ ID NO: 382 - DNA, 502 bp, Arabidopsis thaliana
tcgagcggccgcccgggcaggtgtggtatctctgctaatggatgatgcggaggcagcacaactggagcagaaattcagagaactaccattacagataaaggacaggcagaagaaaaagacgaaacgtatcagaatagatgctgaaggagatgcaactttggaagagttagaagatgttgaccgacaggataacggacaggaacctttggaagaaccggaaaagccaaaatccagtaataaaaagaggagagctgcttcaaatccgaaagctagagctcctcagaaagcaaaggaagaagcaaatggtgaagatactcctcagaggacaaaaagggtaaagagacaaacaaagagcataaacgaaagtcttgaacctgtattctctgcctctgtaacagaatcaaataaaggattcgatccaagtagctccgctaactaatccgaagatgattagagcttcaatagatattttaacttcttcaggcaggttttagacaattgg

SEQ ID NO: 383 - DNA, 502 bp, Arabidopsis thaliana
  misc_feature (1)...(502): n = A,T,C or G
ccatgcctctgatcgcggcggcggcgacggtgactcagtcgagaatcagtcccctgagctcaggaaagatccggtaactaaccgctgggtcatattctctcccgccagagccaagagaccgactgatttcaaatccaaatctccccagaaccctaatcccaaaccttcctcatgcccattttgcatcggtcgtgagcaagagtgtgccccggagttatttcgtgtgccagatcatgacccgaattggaaactccgggtcatcgagaatctgtacccggctcttagtaggaatctcgagacccaatcgacccaacctgagacgggaacaagtcggacaatagtcggattcggattccacgacgtagtgatcgaatcccctgttcattcgattcagctctccgatatcgatccggtgggtatcggcgatatcttgatcgcttataagangaggatcaatcagattgcgcaacatgattccatcaattacatccaggttttcaag

SEQ ID NO: 384 - DNA, 502 bp, Arabidopsis thaliana
ctgtcaagatctactgccagatcttcaacaccaacttcaagacccacacttcctccatctaaaaccatatcaaggtcatctacaccaactcgccgtccaattgcttctgcaagtgctgcaactactacagcaaatcccacaatatcccaaatcaagccttcttctccagcgccagcaaagcctatgccaacaccatctaagaaccctgctttatctcgtgcagcatctcctacagtgaggtcaagaccatggaagccgtcagacatgcctggtttctcattagaaactcctccaaatctaaggacaacattacccgaaaggccactttcagcgacaagaggcagacctggagctccaagctctcgttctggttcagttgagccagggggccctccaggaggaagaccaagaaggcaatcatgttcaccatcaagaggaagagcaccaatgtactctagtggtagctctgttcctgcggttaatcgtggatattccaaagcca

SEQ ID NO: 385 - DNA, 502 bp, Arabidopsis thaliana
cttttttttttttttttcttcgagatattaattagtatggttccatagtttttgtccggtatacacatttaaaactaaaccaaaatccgaaccggacattttctcttacagttaggtataacaagagagaaaatgacatgtacaagaaatgtgaaggaagattacatggattggattgctatgaacattggtttgggttctggtctagtaccagttttagactccttaaccgggactactgcatctggaactctttgacatatgttcttgatagaaaggatcatcagagccttgaactgaactcagtcttggagatgaaaaactgtatccttccttatgcattgcctcgtggcagctttcttcttctttgaacttgatgaagtagatggatgaccagtaatctcttaccaagttcatcttgatcaattgcatgacttcgtttaatgcgttcttgaagagatcagtgtgagttagatcttgagtggttaagatctcttgtcgg

SEQ ID NO: 386 - DNA, 502 bp, Arabidopsis thaliana
tttttttttttttttttttttttaactcgaaacttcccttttatttatgagaagaaagtgttattacaagtgaggtgccgcagacacatattttacacgtacgttaaaggtaaagggacgtgattacaaactgaccatactttattaagaaaaagaaaaacgttttgatttaagcctcgacaatctcctcgatcaactgttgttgttgcctaccggcagcgcgggtcaaagtggtctcaagtgtgttgaacttgatcttcctagcttcctcgggagagatctggaaaccatttgatatgacctccaatggcaatgccctcaagagcgaggttctacccgccaaagtgctgatcattgcgttttcattagttttgaaagagatccactcgaacttgtttccgtgggactggacaacgtatgcgaacccttgtgggatgaccacgagctgtcccttctgcacctgttggtccaacacgttctgtccgttgtcgttgaccacttg

SEQ ID NO: 387 - DNA, 502 bp, Arabidopsis thaliana
cccgggcaggtaccaaactgattgtcattaataatggacgtgtatgttatttttaacaatgataacgacctagctcattatatatatgtcaagaaacagaccacattgataaacaacgaccatcttgttccgattattcgatgaaacatgaaaattctttaactgtatgcacacactcgggtggaatgagcaaaagaacacaaatagcgcaatcgctacttcctcaagctgcgtttccggtagtagtcccgatagtcttgagatcaagctgcgtttacggtagtagttccgatagtcttgagatcaagctgcgtttacggtagtagttccgatagtcttgagatcaaagatctcgatccagtagccatcaggatccttaatgaaggctatattcttcatctttccatcgtttggtttcttggcaaactctactcccaattcttcaaatctctcgcatgccttgtgcacatcatcaacggtaaccccaatgtgcccaaatccc

SEQ ID NO: 388 - DNA, 502 bp, Arabidopsis thaliana
attcgcggccgctaaatttgcaaactgaaattggtctaaaacgcaattgcgtgatttaccaaaacaacattgtgcagtctcatcaatcatcatcatacacttaaactgaaactatgcacacaagttaaaaagaaagtgttacaattttcaaattagacacaaagattggagtagacagacacttgatgagttagtttctttgttccttctatcaagtggcaatcgcttttttatgagattgcatcgagaaacatacacacttagctttcatggcttcagcttcactctcatattctcggaacttgtattcctcttgtttaaacgaaggaggaaccttcccttcaccgtaacactggttacacaaactaaaccgggctttcacttccttaaaccgggatccgattaccgggtaccgacaaaccgagcaaacttggtttccatgacggtttctatcgtttgcctccagtttaaggatcgtagacattataccaaatccccaatc

SEQ ID NO: 389 - DNA, 502 bp, Arabidopsis thaliana
ctttttttttttttttttggaggaacaatttcaattcacaacaatcgtaatgacaaacaataataatgataaaaatgtataataaaaaatgggtttcaaaaatcaaaaagacaattcaaatgatgtaatacaatctttcacattgtaacttaaaaacataactcaatctgcaaaaccatctgatcacaagaacaatgccaccaaaccggaaataaccatggagattggtgcaagtagcagcttttgtccggagttcttgtgtgaggactttggtgaagaagctccttcagaatcagcaactgaaggagaatccgaaggagcactaacgataggagcaggagctggagcaggcattggagggacatcagtaccaaagattgcttcgggtagaagcacgcggttcacttggtaaaccgcaacagggtcagtggagaaaacactgctgctgactttagtcctggtccataaagaatcaatcctaaccgtgccagaaacatcagtg

SEQ ID NO: 390 - DNA, 502 bp, Arabidopsis thaliana
acttaatttgacactcttctttgtgttttctcttccaccttctttttcggtatatcattcaacaaaattctctcttcatttctttattttgttgtttcttattattgaaatcaagagaattaaaacagaggctctgcaaaagaagatgatcaaaacaatcacatctctacgcaaaactctggttctacctcttcatttacatattcgtacgctacaaactttcgccaagtacaacgcacaagctgcatcggccttgcgagaagaacgtaagaaacctctttatcaaaatggagatgatgaatatgtggatttggattgggataatctcgggtttggtctaactccagccgattacatgtatgtcatgaaatgttcaaaagacggcgaattcactcaaggagaacttagtccctatgggaatattcagctaagtccttctgctggagtcttaaactatggacaggcgatatacgaaggtacctgcccgggcggccgctcgagg

SEQ ID NO: 391 - DNA, 502 bp, Arabidopsis thaliana
  misc_feature (1)...(502): n = A,T,C or G
attaatatcataaaaacgagaacccaagttgtaatatcattcaaccactctccaaaacgcaaaaaaaaaaaaaaaanngataattcggaatagttnnngacagataaaagaaaatccctagatgatatcttttagggctttcactcgtcttcctggctacgcaacctaccaagcttgttggaaacaacaacgtctagctgagaagctctctccactatggcctttctcttctttgttgagatattgtgagcaatctctgcacagtaagtcctgttgtgcatcatgagtagctcgagctcagaggtgttgtgaacaatgaacttcttgaatccatttgggaggtagtggcgggtcttcttatcagatccgtaaccaacattgggcatcaaggtgacacccttgaactttcttctcacccgggagtcaatacccttaggcctcctccagctttccttgacggtgattctgcgatcactctggggtctgatgaatttggcagacc

SEQ ID NO: 392 - DNA, 502 bp, Arabidopsis thaliana
  misc_feature (1)...(502): n = A,T,C or G
ccgccctttttttttttttttttttttttacaagtacatacacataaaatcagaatgatcattagatacaatagtgttacacataactcatacggacatataaaataaaataacacttgtagaacatatcccattcataagaaacgtaattagcctcttaaacaaaaaacgtaagaagctaatcttcattnnnttttttctcattccacacaaattttcccattaaacacacaaaaacgagttacaattacttaacacggcaacgaggttgctttctccttctgttcgtctcactgtacagttaaaaatggctctatggactgtgcaagttctttagctgctcaaccacatcaagagtattgcttagctgatgataatcggagcgatgaagagcgtttatttgtcccgaggttttggttccatcattgaaatggttctttgcaggtccaccacgagggcagtgacgcacacggattctatgctttcttgtctcagtcgagaa

SEQ ID NO: 393 - DNA, 502 bp, Arabidopsis thaliana
tatcactattattcttacacacatcaaagagtcaagacaaaggatgttacataaagatgagtcctcaaaaccaatgactcatttattttaagtaaaaccaaaaacttccacattagctttagattaatgcaacggatcaacaacttggccaatgaacagaaccactcctgttatgttctctgtgaccaccaatagaaacggatggtctgcaacaaaatctatttcatcttcctccataagcaatcctcttagctttataactccagctgatgcagctgcagcttctgttccttcttcattcacttcgatacacgctttatggaaaatgttcgatacgcatagattcttccccatctcaggagattcaaccatctcagttaaaccttcttcaccgctgaaaggcgaagtcagtcccaatccttttaaaacatttgaagcatcgaacccgaaagagaatttaaactttggaatcttgaattcgcggactttaacttgtctgcgt

SEQ ID NO: 394 - DNA, 502 bp, Arabidopsis thaliana
ccacgcgtccgctgaatcttcttctccgatcttcaaacattccggccgccaccgagttcttagccgttacaatgtcttcctctatgaacgtagcgacgatgcaagcactgactttctctcgccggcttctcccttctgttgcttctcgttatctctcttcttcttctgtgaccgttactggatactccggtagaagctcggcttacgcgccttctttccgttcgattaaatgcgtctctgtttctccggaagcttcaatagtaagtgatacaaagaagttggcagatgcttctaagagtacaaaccttataccaatttaccgctgtatattctctgatcagcttactcctgttcttgcttaccgttgtttggtcaaagaagatgaccgtgaagctcctagctttcttttcgagtccgttgagcctggttctcagatgtctagcgttggtcgttatagcgttgttggggctcagcctgcgatggagatcgtggcaaaggagaa

SEQ ID NO: 395 - DNA, 502 bp, Arabidopsis thaliana
caaattattcttcatacaaatttaattttacttcttctatcgacaacacatattctttgctttcattgaaaaccccaacatagcagcacagatggggcctagcctataaaaacaaaaaagaattgagaggaaccccttaactttggcaggagaaaagttggcagctacagccactcacggcaacgaccacatctccagctacctcctatgcacgtagattcctcctcccatggagaacagtgagaatgtattgtcatattacaagtctgacatgtgaggtcaggtcctggctccacatgcttgcatatctgacatggaattgtattttcatagagaaatgacgtgcactgttccattgcctcaacctgagggtttgggttatccgtgattcctgaagcatccttgtcatctccatatccatcgcactggccactatcatctgttgtgagcaactcggtcagcgagaaatatgtttgaggttcgaattccatgtcttcgtagt

SEQ ID NO: 396 - DNA, 502 bp, Arabidopsis thaliana
acgctattggaagatatctttggttttggttttaagcaaggcgatccattaactgggatgttagacgctttgtcgaatgaattttctgtccagcgaatgggcggagtaggtggagggatgctaagagatgtccttgctgtttcagctaatcttcctactcttagtaggatgttccctaaggacacactgctttggaggctggaaatgcttaagtatgctattgcttctgtgaactctcacataaactcagtcagagcggaaacactcatacttctgagtggacgcgatcattggctcctgaaggaggaagacattgacagatactcgcgcacgttgccaaaatgtattgtccgtaagctcgatgacaatggacagtttccccttttggaggatggtgtagatcttgctactatcatcaagtgtacttgtttttatcgccgtgggaagtctcacgatcacattacggattacattatgcctaccacatttgagttaaaacaac

SEQ ID NO: 397 - DNA, 501 bp, Arabidopsis thaliana
  misc_feature (1)...(501): n = A,T,C or G
tttctcttccgacccaaaaaaaacaaaaaacagtcttcagaaggaaatctgaatttgatctacaatattccaaaaaaaaaagaatcttcaaagtgtataagaaatcaagaatcttctgatattgattagcctcaactctcaacgtcttttgctttaagctgtgacacaatcttgtaaatanggatggctcgagttcaaaaactttaaccagaaaggtttatacctaccaatagccagctttagccaaggcttcatgttaccattatagtgaatcacagctgctgtttcgatcagacggttatcgatgttcacatcgtaacctaaacccaagacatgccatcttctgtccagtggctctgtgagaccatagaaagatagtagacctggagggagtgtcccgagtttccaaagcgttcgttctctgttctgatcttgccagtaatggtaccgagcagtcacgtttgcattcctccaagcgatcagatcaaaaacgttcatacc

SEQ ID NO: 398 - DNA, 501 bp, Arabidopsis thaliana
gggaatctcattagcccttggtggatcaccttatgagtttgagggaaagatgcttagagaccctttttgggtaatgcgtatcattggttatccaggtgtaaaccaagaaaatgttattggatgtggagctcacactgactatggcttgttgacgcttataaatcaagatgatgataaaactgctcttcaggtgaaaaacgtggacggtgattggataccagctattccgatccctggatcgtttatctgcaacatcggtgacatgttaacgatactatcaaacggagtttaccaatccacactacataaagtaatcaataactctcctaaataccgtgtatgtgttgcattcttctacgagactaacttcgaggcggaggtagagccacttgatatctttaaagagaagcatccacgaaaagaaacatctcaagttgccaaaagagtcgtctatggacagcatctgattaacaaagtcctgacaacctttgcaaatttagt

SEQ ID NO: 399 - DNA, 501 bp, Arabidopsis thaliana
ccacgcgtccgaatggaacaagccgcgttgaagagcagcgtcaggaaagagatggctctcaaaacgacttctccggtttacgaagagtttcttgccgtcaccaccgctcaaaatggcttttccgtcgacgatttctctgtagacgacttgcttgacttgtcaaacgatgacgtttttgccgacgaagaaactgacctcaaggctcaacaagagatggtccgtgtttcttctgaggaacccaacgacgacggagacgctcttcgccggagcagcgatttctccggctgtgacgactttggttctctccctacaagcgaactctctcttccggcggatgatttagcgaaccttgagtggctctctcatttcgtggaggactccttcacggaatattcgggtccaaacctcaccggaaccccgactgagaaaccggcgtggttaacgggtgaccggaaacatcctgtgactgcagtcacggaagagacctgtttcaaatcccct

SEQ ID NO: 400 - DNA, 501 bp, Arabidopsis thaliana
tgatgagaaggctgtcaaggctgcgtctttcttgctcctagagcaaaagttcttggagtttctcaaagttgaaaagatagctgatgcgctacgcaccttaaggaatgagatggcgcctcttcgtattaatacaaagcgtgttcatgagctcgcttcctcccttatatcaccttcaagctttatatcacataccacttcgactccaggtaaagaaagtgtgaattcaaggtctaaggttttggaggaactgcaaaccttgcttcctgcttctgttataatcccagaaaagaggttggagtgtttagttgagaattcacttcatattcagcgggattcttgtgttttccataatactttggatagtgatttgtctttgtattctgatcatcaatgcgggaagcaccaaattccttctcagactgctcagatcttggagtcacataccgatgaagtttggttcttgcaattttcacataatggcaaatatttggcttcatcttc

SEQ ID NO: 401 - DNA, 501 bp, Arabidopsis thaliana
actaccagtgacacgaaggtggatatcaactcttttgtctagcaaagaagagtgggaagaacacaacaatacgctttcagccttgaatgtggttgagagatcctccatgggtatttctctcaaaacgggtggaagctttctatccccagtcaataccacgtccaagtcaactgttatggacactgcaggtcaactatcagaatgcaagggagaaagagttgatttggcagtgaggcttgggttgttgaagctggtgaatcaggtagctggtttaacaccagaagttctaccggaaacttttcagctcaacctctttcgcgtgagggatattcaagctgaaattcagaatataattgtggtaaccacaagcttgctcatttggcgtcaaatgcttgcaaagagcgaaagcgaaacagaaagtatggcaaagaaattgttggagttgttagatgggaaggaaggagcaggactaacggagataatcgaaacaacaatgagtga

SEQ ID NO: 402 - DNA, 501 bp, Arabidopsis thaliana
agcctcgagagcaaaattctctcaagctttagccatgtctgcctctgcttcttccctctctgctttcaatcctaaatcccttcctctctgcgtctccagacccgcttccgtctccgtcttacctccttccctctccttcaaacttcactccgaccacctcgtctctatcttcgcttcctccgccctcaaatgctcatcccccgccgagtacccgtcgcgtttcgttagaaacgttgctgtatcttcggattttgaggtggaggaagatgatatgttcgctgacggtgacgattcagcgcctgtggagcgtaactccttctctcctgaccttaagctctttgttggtaacctttcttttaacgttgatagcgctcagcttgctcagctctttgagagcgctggaaatgttgagatggttgaggttatctatgacaaagtgactggccggagcaggggtttcggatttgtgacaatgtcaaccgcagcggaagttgaagcagc

SEQ ID NO: 403 - DNA, 501 bp, Arabidopsis thaliana
atatgattgtcactcgaacatgaatgagagtctcccccataatcatcgctcacatgtcggtagcaataactttgatatgagttccacgactgagaacaacgctttcacaaaaccaggagctccaaaagtaagctcagcaggatcttcatcagtgaagcattcatcgtttcagcctttaccctgtgatcatcataataatcatgcctcctataaccttgtccatgtcgctgagaggaagaagctaccgccacaatgtggatcctcaaatgtgtacaacgaaacgattgaaggtaacaacaacacagtgaattacagtgtgaatggaagtgtatcaggtagtggtcatggaagtaatgggccatatggaagcagtaacggtatgaatgctggaggaatgaatatgggaagtgataatggtgctggcaaaaatggaaatggcgatggtagtggaagcggaagtggaagtggtagcggaaacttggcggatgaaaataagatctc

SEQ ID NO: 404 - DNA, 501 bp, Arabidopsis thaliana
  misc_feature (1)...(501): n = A,T,C or G
ccttcagtgaggagaggaaatgtcggatcttcagacaccgcttgtgaggcccaagaggaagaagacttgggttgattactttgtcaagttcagatggatcattgtcatcttcatcgtccttccattctcagccacattctacttcctcatctacctcggggacatgtggtcagagtccaagtcctttgagaaacgtcagaaggaacacgacgagaatgtcaagaaagtcatcaaaaggcttaagggtagggatgcttccaaggacgggcttgtctgcactgctcgtaagccctggatcgctgttggaatgaggaacgttgactacaagagagcccggcatttcgaggttgacttgggggagttccgtaacatccttgagatcaacaaggagaagatgactgnnngagtggagcctcttgttaacatgggacagatttcccgtgctaccgtcccaatgaacctgtctctcgctgttgttgctgagcttgatgaccttaccgt

SEQ ID NO: 405 - DNA, 501 bp, Arabidopsis thaliana
ccacgcgtccgttttttttgggtgaaattcacagaacaaccaaggtttttcttcttcttcttcttctccagttcctacagaatcatgcctgacaagaatatcgtagaggacgttatcggtgatttggtggataacttcacggagactgttcagaagaacaaacatggttcctccttcttcgaacaagaagattccgtcagttctcgtttcaaccgtttgtttgatcgccagaagccaattcatcatgtcttaggcggtggcaaatctgctgatgtgttgttatggaggaacaagaagatctctgcaagtgttttgatgggagctaccgcaatttgggtgctttttgaatggatcaatttccatttcctgtctctcgtttgctatgccctcttgcttggtatgattgcacaattcgtttggtctaacgcctctggattcttaaaccgctcacagtctagagtgcctcgcctagttcttccaaaggatttctttgctgaagtc

SEQ ID NO: 406 - DNA, 501 bp, Arabidopsis thaliana
ccacgcgtccgcccgttcccaactagacaaccaatgagactctacgcgagtctttgggaagccgagcattgggcaacaagaggaggattagagaaaacagattggtcaaaagctccttttactgctttttatagaaactacaatgtcgatggatgtgtatgggctaatggaaaatcatcttgttccgcgaattccccatggttcactcaaaaactcgattcgaacggccagacaagaatgaaaggtgtgcaaagtaaatacatgatctacaactattgcaccgataaaagaaggtttcctcgaggagttcctgccgagtgcacttaaattcttgattctttgatacatgaatatgttacttggcattgcctttgtaactcaatcaagtttttatttatttttatcatttatttgttgctcatatatacagtatgtggtgtttgtgtaagatgttttaagattgaagtaataaaaataaattatggaaaaaaaaaaaaaaaa

SEQ ID NO: 407 - DNA, 501 bp, Arabidopsis thaliana
ttcctctcaccctcttcgcatagcttcactttcgccgatggctctacctaaccagcaaaccgtggattaccctagcttcaagctcgttatcgttggcgatggaggcacagggaagaccacatttgtaaagagacatcttactggagagtttgagaagaagtatgaacccactattggtgttgaggttcatcctcttgatttcttcactaactgtggcaagatccgtttctactgttgggatactgctggccaagagaaatttggtggtcttagggatggttactacatccatggacaatgtgctatcatcatgtttgatgtcacagcacgactgacatacaagaatgttccaacatggcaccgtgatctttgcagggtttgtgaaaacatcccaattgttctttgtgggaataaagttgatgtgaagaacaggcaagtcaaggccaagcaggtaacattccacaggaagaagaacctccagtattacgagatatctgccaa

SEQ ID NO: 408 - DNA, 501 bp, Arabidopsis thaliana
aactctcgctccggtttggtttagacgaagattccgaatcaaaatcttcctccgtcgcaggaatccattcgttcgtcgccggattgcttctgtaaaccgctttttctcctccgtctccgattgcggcggcggttacggcctcggattcttcaccgttgtcttccttcaccacatttataaacccacttccggtcgtgtgatgttgcttatcaatggcggtgagatttgagtaatactctgtttccaggaactcatcttgaactgcagatgaatctccctcacctagaactttaccatgagtttgtgactggagagattggaatttgtcagcttcaggatggtcggtgattttgtcggaagcagagaaagatccaggaaatcccggttcgcttcgagtgggtttagtgggtcgtttgggagccaaggaatcgaaatcagctctgatctggttcgcgttcttgatctgctgttccgggtcggatatttcgtcgctccggcttg

SEQ ID NO: 409 - DNA, 501 bp, Arabidopsis thaliana
aacgaatactgtaaccaacttcttcaccaatggagacatccatttcatcagcaacacgacgagacacagacattgcagcaactctacgaggctgggtacatccaaccaaccatttccttcccttatcggagttgtcagccaccacagcatctaatacaaactgtggaatctgtgtagttttaccactaccagtttcaccgacgagtatgagagtttgattagagttcaaagtattgagaaagtcatctttctggagccaaacgggaagatctctcctcttctccagaatctcgaaatacctctgagaataagcctttccgttccatttgttgatcagattgcttccaccaccagccgccgccgcaagtccgagaccattggatttggtgttcttcgacgaaagagaaggatcttccataacatcgaacaaactaaccttccgttttctctctgtacccattacgaacgaacaaaacgagacctgcccgggcggccgctcga

SEQ ID NO: 410 - DNA, 501 bp, Arabidopsis thaliana
ctttttttttttttttttttttatgtaacatactcattccataagtgctttgtataaatactgcatgaaagcacaatgagactataatcattgatatgttcatgcgtcatcatccatccttggattcttatttattacattcagacatagtacataatttatatgggcattatttaactagctagtgagcctgcatgtcttcgtttctcacttttacgtagccctggccatatgattagtaattagggaagtgtttgcggctgaagctattgatgggaccagttccttttgcggtgccggtgaggttataattagaacgggctttgccagaataaaccggttcgtcccagtcagagtcgctgcgggcaacgaattcagtgtaacctccaacagtcatgggggctccttcgttgtccgaatcagagtccgacttctcgtgggtcatgtttcggcccatttcagttggtttcttctctacttttctaaacgacattgtttcac

SEQ ID NO: 411 - DNA, 501 bp, Arabidopsis thaliana
ttttaaactcgcatcagacactaaattcaaacttttttctcttctccgattaaacttaaaaagacaacaacaacgtgtattatttcataacctatgttgctgctctttatcaccaaccatttcaatttgatcatcaaacttgatcaacaaggttcgaatttccatcggaacaagctcaaccactagcttctctgcgtccaccgcctctcctctcttcacttcctccccggccgagccttctactttccagattagccgtctcttctccatctccgccttctcttggttcccggaaagacttgtctcctttacttcccttatctttttgttgtggaatagtttcttgagctctacttttgccataactgagtactcactatcctccccaacctcgaataagtgagcaagccttagaagaacttccccattttccaactcctggagggtgagtaatgcgacgttttttggtaatgaatatgacggttcaaacgctgagaatgt

SEQ ID NO: 412 - DNA, 501 bp, Arabidopsis thaliana
cttttttttttttttttggagtatgatgtttttgtcatagacaagtgcatcaattatcattatttctttatgattcgaaagaacataaataaacacaaaacacaccgagcctagcataattttcagtaccaacgtacaaaacagaaccaacgcaacaacaagtaagcaagaacacagagattctaagcgaagatttggtcgacaggcttggcaacttctttgtggtcacgctcctctttagccagcttcttgaggcgagcaagctccaaatctcttcccatctttctcttaaacatctcggcaaacgtgattggctcctccaatattgccttctctccttctcttactttcagtggatacactgtggcatccggcgcggggttctggaacgtggctatggataatctgctcgagttagagttcaccacggcctgatgatcagcattcttgaacctcccattgctcaaaaaatgaccgtggtcgccgagattgacgacaaac

SEQ ID NO: 413 - DNA, 501 bp, Arabidopsis thaliana
cacagtcaaacagcttgacgcctcaggcaaaccagacagcttcaccggaaaattcttggttccatcgtaccgtggctcttccttcttggacccaaagggccgtggtggatccacaggatatgacaacgccgtggcattgccagctggaggcagaggagacgaggaggagcttgtaaaggagaacgtgaagaacactgccgcttcagtgggagagatcactctgaaagtgacaaagagcaagccggagacaggagaggtgatcggagtgttcgagagtcttcagccgtcggatactgacttgggtgctaaggtaccaaaggatgtgaagatccaaggggtgtggtatggtcaacttgagtgatcatgttattatattttccgttgattgtgtttgatgataatgataacatcttttgatgctttcttcgtttatctctcttatataaaatgcacatgcctaagatcttgaattttctgcaaaaaaaaaaaaaaaaaaaaaaa

SEQ ID NO: 414 - DNA, 501 bp, Arabidopsis thaliana
tcgagcggccgcccgggcaggtttccaatctctctctcattcaaacccaaataggaaacaaatacacaaaagtataataaaaagtctttctctcatctttcgccacgtagacatggacgtcgaacatcacaaatccggccacatcagtagaccaacggtggatattccaccgaggaagcttctttcctccgccaagtctccgtcgtcagtttcaagtccccttcgcgactataaagaacagaaagactattgttacgactctgactcggaagatccttacgccggagaccatttccggatgtacgaattcaagatccgacggtgcacgcgtagccgtagccatgactggaccgactgtcctttctctcatcccggtgaaaaggctcgtcgccgtgaccctcgccggtttcactacaccggagaagtatgccctgagtttagccgtcacggtgattgtagccgtggtgatgaatgcggtttcgctcacggtgttttcgagtg

SEQ ID NO: 415 - DNA, 501 bp, Arabidopsis thaliana
cggccgctttttttttagcatataaacttcagattcttagataaaaagaaaactccaatccctttttaggacaacaagttccaacattacataagtgtgagtctaacaagctttaaataaaataaatataagaaagaataacaaattctttttgtagactatgtatcatttgggtccacatcttcttccccactggaaaatcattacaatagtgttacgaacaatttcaccttctctggctactcggagaaagctaatcttggacatggaatcaccttaactgcccggttcactggggtttgatgggtttagatgatttggaattcccattgcgcgtttttgatatatgcacacacaagtatataaatagggtctaaaagacacctcctttgccattgaagttgttggcattgggattggcgtccacaaagggattgatcctgacccaaagcaacgagaagatggaggcgagaagaacagaccagacaatgacgatggttg

SEQ ID NO: 416 - DNA, 501 bp, Arabidopsis thaliana
  misc_feature (1)...(501): n = A,T,C or G
ttttttttagtagatacgcaaaatatataaaggaaaatcaaaatgtctgaagaacagagaagcaaaacaaaactgagaaaatacgatttgaacccaaaaaaaacaaaacagatgatagctatttgtttgacacatttgtttaaccagtgatgttctgagacttgttgagaatgactccttcatatttcanntggnnnnatttcatggcatcatctttcgtcactctatgctggattccaacacgagtcttgcatcttctgcggcgcgcaacacggtaacctggtcgctcaagaacaacatagaagtccatgccgtagattccagtcgatggatcatacttgatacccaaatcaatgtgctcttgaataccaaaaccaaagcaaccagtgtcgctgaagttccttctcaagagttcgtattctttaactttcaatccactctcaaggagctgcattgccttctctcccctgacagtcacatagcaagcaatcttctcattac

SEQ ID NO: 417 - DNA, 501 bp, Arabidopsis thaliana
cctctagagcggccgcccttttttttttttttttatttatgaaacttattgatcgaagttttgcacttgaaagagtgtttccagcatttcaagtaattcaaaaactttttttcatattattatgaatcaatgttttgtatgaaaaataagtttgtgttgcatctgcctttttttgtgctctctgtttctgcaagtgcactcgcatgctgcatgtggctagtgaaccacttttgggaactcagagaagtgatctcctgagcttggagtgaacttcatgctcaccaaactccggattaccaccacctgtgcctgtggatactttgtctgcagaatctgacccttctttggactggtcgggacttgtatctgcatctgatgtgtttggaacacagtatttttgaagccaacggtcagtttcccagagaacgtgcataatgctttcccgtgctgagtacccgtggctctcgtgaggaagaacaacaagacggcaaagagcgccgt

SEQ ID NO: 418 - DNA, 501 bp, Arabidopsis thaliana
attcgcggccgccttagacttatccttcaatgaattaagtggtgacataccgttttcgatttcgaagttgaagcaacttgagcagctgattctgaagaataaccaattgataggaccgatcccttcaacactttcacagattccaaacctgaaaattctggacttggcacagaataaactcagtggtgagataccaagacttatttactggaatgaagttcttcagtatcttgggttgcgaggaaacaacttagtcggtaacatttctccagatttgtgtcaactgactggtctttggtattttgacgtaagaaacaacagtttgactggtagtatacctgagacgataggaaattgcactgccttccaggttttggacttgtcctacaatcagctaactggtgagatcccttttgacatcggcttcctgcaagttgcaacattatcattgcaaggcaatcaactctctgggaagattccatcagtgattggtctcatgca

SEQ ID NO: 419 - DNA, 501 bp, Arabidopsis thaliana
  misc_feature (1)...(501): n = A,T,C or G
ggattgatacttctccaactcttgaactttcttttggctctggtgatccggttctcggtttaaagcttggtaaacgaacgtactttgaagacttttgggaagtggagaatgctaaaggtttgggacttcccgtgagccttgcttcgtcttctgtttctccggtgaagaaatcgaaatccattcctcagaggttacaaactcctcactgtcaagttgaaggctgtaatcttgatctttcatcagctaaagactatcatcggaaacataggatttgtgaaaaccattcaaagtttcctaaagtcgttgtgagtggcgtagagcgtcggttctgccaacaatgtagcaggttccactgtctctccgagtttgatgagaagaaacgtagctgtcgccgacgtctctcagatcacaatgcaagacgtcgcaagccaaatcctgnaaggacatatgatgggaaaccacaggtggattttgtatggaacagatttgcacttatccatc

SEQ ID NO: 420 - DNA, 501 bp, Arabidopsis thaliana
cgaaacccttgtgagagaacttggtgatgccgaagatggtaactccgacgagtactggaaccagtttattgagccattcgcagaatctgagggtcaagtggtctcttctctctcattgctttatcttaattaaggtattgagtaatgtaatacacgtatctacatgaagatgaggatataaatatccatttatgagaaaagaaaaaaagggacaaacaaaagttggcaagtttaactaagtgaaaagtctatggcggagacaacgagttggatcccagtatggtttcctctgatggtgttgggatgttttggtctgaattggttggtcaggaaggtgaatgtgtggctctatgagtccagccttggggagaacaggcactatctgccaccaggtgatttgggttggcctttcattggcaacatgttgtcttttctcagagctttcaagacttctgaccctgactccttcactcgcactttaatcaaaaggtatggacctaa

SEQ ID NO: 421 - DNA, 501 bp, Arabidopsis thaliana
ggatgaacattattgggctattcatggttcttatgttgcttctcatctccctcatcatccttttcgcctgcaagccatggcgatatttttctcgtttccgatcctcctctcgtttttcttctaccttcaaggtgggggatttgcagagaccacttatttctgatgatggaaatttgatccaaggacaaaccagtgaggtaacaagggaatatgatttagagggagcttgctaccaaaatgatggacttttgcattcatctctgactgagggacggttttacaaacaaaggcttccttcgtcatctccccatttctcccaaggtgaaagctttgttctagaagtaatttctgaaccttctgacaatgctttggtgggccaaacgcttaaacttccagctgaaaaaggttccttggcagaagtgcaaacatatgactggcagaataacagaaatgaaaacttgcaatataatctggaaaaggatcgacttattaatctttctc

SEQ ID NO: 422 - DNA, 501 bp, Arabidopsis thaliana
gataatactctgctttttttagaaatatacagaggaaataaagagagagagaaggagatggcggattcaagcgattctgtctccattgatatggaggcattgtctcttggaggacaggaacaccttgtggagactacttatggcccggtttgtgttgccgtttgtggagatccagataaaccagctcttatcacttatcctgatatagctcttaattatatgttctgttttcaaggattattgttttgtccagaagctagttctttgttactccacaacttttgcatatatcacatcagtcctcttggccatgagttgggagctccaatgatcagtgttgatgctcctttgctctcagctgatgacttagcagaccagatagtcgaggttcttaattatttcggacttggtgcagtaatgtgtatgggtgtcacagcaggagcatacattctgaccttatttgctgcagagagttctgggcttaattctcgtctctccact

SEQ ID NO: 423 - DNA, 501 bp, Arabidopsis thaliana
gtcagtaacatctggtagcaatcttggcatcgccacaccgccactgatcaacttcataatcgaaattcccgctgtaattatgagaaatacaaccgccagagccacggataaggcagatgtaaatttcaaagaatcgattcgcttgaagcaagccaatggagcaaacacaccaagagtagtaataagaagaatagcagctcttccattccaccaatggtgaccaaaccatccttcaagaacaccgaaatgatggataccatcttccgtctttccagccaacacatcacctataatgatcatgtaaacaatcaaaacaccgatgttgttaactaaaaccgcgacttgaagcaaaatccttccaggattaccaaaagaaccacccattaaaccaccgtaagatcgattcttcccagctttactaaacctaagcaagaactcaatcgatgcatcagtcaagaaagccataacaacaatcatagtgattccaagtccaagtccaag

SEQ ID NO: 424 - DNA, 500 bp, Arabidopsis thaliana
tccttgtccgacctcagtacggttgggaagcttcccgcaccaacacttcgcgaaccaaacgaaagtatagcatgtaccagtacgtgctgtttgtagtttcagtggtgctacttgtggttgggctaacggttgcattagtgatgcttttcaaaggagagaatgggaacaaacattgcaaatggtgtcattaccttagctgtttcccaacttctaaatggacctgctaatcatcatcatcatcatcataatcatatagtaaaagcttttatatgtgttcttgttaacatttaatctctttgatctctctagcctttgattatttatatatgtgtacattaccaaattcgtcttgtgtaaaaggggatagaaataaaagagtgtattatttttacatttgaacaccatatttctcaaactgtctttaagtacataaatagtaaacaattttattaatgtaaaacataagctgtaattggaaataaattcctttaatttggtta

SEQ ID NO: 425 - DNA, 500 bp, Arabidopsis thaliana
tcgagcggccgcccgggcaggtgaagctatggcggtctggtggggagttgcaaagcggtgccaacgaaatcaaaggagatctctttgctcaatggtattggtcaatctcaaacagtgagttttgatttgaaacaagagtcaaaacagcctatttcgttggtgactctgtttgagctagtagctgttgatctgcagactttgaatgacaatcttttatcgattgttggtgcggaaaatccggttttgatatctgcggctgagcagattttcggagctggtggtaaaagaatgagaccgggtttggtattccttgtatcacatgccacggcggaattagcaggcctaaaggaactaacaacagaacaccggcgtttggctgagatcatcgagatgatacacactgcaagcttgatacacgacgatgtgttagacgagagtgacatgcgaagaggaaaggaaacagttcatgagcttttcggcacaagagtagcggtgctagc

SEQ ID NO: 426 - DNA, 500 bp, Arabidopsis thaliana
  misc_feature (1)...(500): n = A,T,C or G
acctaaatacagtcctcctgtggaggttccacccccggtaccagtttacgagccgccgccaaagaaagagattccccctccggttccggtttacgatccaccgcctaagaaagaggttccaccacctgtcccagtttacaagccaccaccaaaggtggagcttccaccgcctattcctaagaagccttgtccacctaaaccgccgaagatagagcacccacctccggttccggttttcaagcccccgccaaagatagagcacccacctccggttccggtttacaagcccccgccaaagatagagcacccacctcccgttccggtacacaagccaccgaannnnccatgtccgcctaagaaagttgatccaccgccggtgccagtccacaaaccaccaacgaagaagccttgtccgcctaagaaagttgatccaccgccggttccagtccacaagccgccgccaaagatagtcattccaccgccgaagatagagcacccac

SEQ ID NO: 427 - DNA, 500 bp, Arabidopsis thaliana
ccacgcgtccgcagaaaaggtatgaagcagcgcttgaacgaaaatcaaagatcatagagatcatccgttctctgaatcttccaaacaatcctttggatgacatcgtcgatcagcttggaggccctgaaaaagttgcagaaatgacgggcaggcgaggtatgcttgtaagagcatcgaatgggaaaggtgttacatatcaagcaagaaacacaaaggatattaccatggaaatggtcaacatgcacgagaagcaactatttatggatggtaaaaagttggttgccattatttctgaagctgggtcagctggtgtttcgttgcaagcagatagaagggcagtaaatcagaaaagaagggttcacttgactttagagcttccctggagtgctgatcgtgcaattcagcaatttggaagaactcaccggtcaaatcagacatctgcacctgaatatagactactcttcactaatctcggtggggaacgccgctttgcctctatt

SEQ ID NO: 428 - DNA, 500 bp, Arabidopsis thaliana
tccgagcgaaaagcgtttggtggcagcacgatgcagcgtcttcggtagcagcagcgattacagaatgcaaacatggtaatgggaaatcgaagggtgatatatggttgatgttcacaggtccagacagagctgggaagagcaaaatggcgtctgcgttatcggatcttgtttcgggtagccaaccgataaccatcagtcttggttctagttctaggatggatgatggtttaaacatccgtggtaaaacagcgttggatagattcgcggaagcggttaggagaaatcctttcgcggttattgttttggaagatatcgatgaagcggatatattgctgcgtaacaacgtgaagatagcgattgaacgagggagaatctgcgattcgtatgggcgtgaggttagtctagggaacgtcattattatccttaccgcaaattcatcgctcggttcagcgaaaaacgttgcttctatcgatgaaacgagactagagtctctggtgaac

SEQ ID NO: 429 - DNA, 500 bp, Arabidopsis thaliana
ccactgattagatcctaattcgtcgcctagctcaaaagatggtgctttcgcaaaagcttcatgaagcatttaaaggaacagttgagaggatcacaggtcctcgtacgatctcggcgttcaaggagaagggagttctcagcgtcagcgagttcgtacttgccggagataatctcgtctccaagtgtcccacctggtcttgggaatctggtgacgcaagcaaaaggaagccatacttgccctcggacaaacagtttttgattactagaaatgtaccttgtctacggagagctgcttctgtggcagaggattatgaagctgctggaggtgaagtgttggttgatgatgaagataatgatggttggctggctacacatgggaaaccgaaagataaaggcaaggaagaggataacttaccatccatggatgccttggatataaacgagaaaaatactatccaatcaatacctacgtattttggaggtgaggaggatgatgatatt

SEQ ID NO: 430 - DNA, 500 bp, Arabidopsis thaliana
tgtgattcattattttgcctagttttacttttcaaatagacttctaacaaaagttatgactgaaaaccaattatatagctttataaccatgaagagttcattgtctaaatgcaaacagtcttcttctttgtctttccctttgtttggtctgatcaacttcttcctcatcggttttttcagatgggtttcttttgctcagttatttttctctaggttctggcctcttgttcaacaccagcaatgtgtttccgagaagaagagcaaagatcttgagttccaaacttcgatcaaacacgaagaatatcgtgatgatgatgatgatggtctttgcagagaagatgtagggatggttatgaaaagcttagggctttccactgaccaagaaaacgagggacttcaaaaacagtacagttccaaggaggtttcgaatctgttcgaagagaaagagccaagcttagaggaagtgaagcaagcttttgatgtctttgatgaaaacagag

SEQ ID NO: 431 - DNA, 500 bp, Arabidopsis thaliana
gagtgtatcatagagaagaaagatcaacactctcttcaatattttaacccaaagaatgcatccattgagagagagagaggaccaatacaagaaaacaaacatgtcaactcaacaacatttacacgcccccaaaatcatctcatcaacaactggagactctacaaaatagaaagcttttggaaaagcagagctgaaaagagaagatcaaaagttattgaccattcaccttcttaacaaatgtaagatgggtttggtttcaatagctgccatgagatctcgctgatgaaacagactgagctgacactgaagcagtcggactgtggacatccccgttgttgccctttgtcttgccactcaatctttccatcgcatccacacatatgtcattgaaccaatcgtcttctggcagctcactatatggatctatccctgttgcggtgaaagctgctaaggctttagatattatctcattagttcccctgtgcaaattcctcgatagg

SEQ ID NO: 432 - DNA, 500 bp, Arabidopsis thaliana
ggtactgcgggtcaagataaccaggagtcccttgaggagccgttgatatgtgagaagattccgtcattcccagtctagagagtccgaaatccgcaactttggagttgaaatcataatcaagaaggatattggtagatttgatgtcacggtgatagatcggtgggttcattgaagagtggagatacgcgattgctttagctgtttgagtagcaacagtgagacgcaaggtccatggaagaccactccctctatctctttgtagatgttcagatagagttccattcggcatgtactcataaacgagaactggatcgccttgttctatacaacatcctaagagacggacaagattcgggtgactcacagaggaaagaagcttgatctcattcatgacttggtcaagactttctgaatctctatgtctaagtcttttgatagcaacccattcatcattttggagctttcctctatagaccgtacctgcccgggcggccgctcga

SEQ ID NO: 433 - DNA, 500 bp, Arabidopsis thaliana
gcggccgcttcaagtacctcttttttctgattctgtatatcgccatgaattactgatttccctctctataaacccatcaaagtaaaccaatttctcctgtgacttgtacctaactcgatcttaccagactggtgatggcgtctttgaaccctttcgatcttctaggagatgatgctgaggatccaagccagctcgctgtggctttgtctcagaaagtcgagaaagctgctgctgctgttcagcctcctaaggccgctaagttcccaaccaagccggctcctccttctcaagcagtgagggagtcgaggaatgctcctcaaggaggtcgtggtgggactggtggacgtggtggattttcccgtggcaggggtaatggtggatacaaccgggacaacaggaacaatgatgctcctggaaatgagaatggattttctggaggatacaggagaccttctgaagatgctgatggagcaagccgtggtgggtctgttggtggatac

SEQ ID NO: 434 - DNA, 500 bp, Arabidopsis thaliana
ccacgcgtccgactgttgttgcctgtgaagctgctgatcgtgctgtgaggacaatccttgatgccatagaacaggtcggagggatatacgttgtgactgcagatcatggaaatgctgaggacatggttaaaagggacaaatccggcaagcctgctctcgataaggaagggaaccttcagattcttacctctcacacccttaaaccagtgccaattgccataggaggtcctggcttgtcagcaggagttaggtttagacaggatatcgagacacctgggcttgcaaatgtagctgcgacagtgatgaacctccatggatttgtggccccgagtgactatgagacaagtctgatcgaagtcgtcgagaagtgatgattcttgttgttgtagttctttttaaaagtcccacctgagcctctatagactctgattctcttttaagttactattttcaccgctctctaataaggctcgtgattttttgggagccatactgtatac

SEQ ID NO: 435 - DNA, 500 bp, Arabidopsis thaliana
  misc_feature (1)...(500): n = A,T,C or G
ttttttttttttttttgaaccggaaacgtgtttttattcaattatggtttaaaatggaccggtttatgatccggtttacaatagtgaaaaacagaaaactaaaacgtatatcctttttgttcacaacaaacaacttcaacattatttaaagggactctccacaaagctttttagttcttgtgctgtaatctcccactctcagcaccagcaaaaggatcaataataacatttaccaccgcgggttttcttgcggcgaacgactcagcgagagcnnatttaagctcatcgggtgtttccacaatataacctttgcctccaaaggcttcaatgagcttgtggtagcctgcattaggaacaaatgatgttggtgctggatcttctttatgaggaccggagatttcttcaggtccccttcgatcaccgccgtagacaccaccattgttgaagactataatcaccacagcaagattgtatcgaaccaatgtctcgacttccatggc

SEQ ID NO: 436 - DNA, 500 bp, Arabidopsis thaliana
  misc_feature (1)...(500): n = A,T,C or G
cagagagcgaagaagaagactcaaaccaaaaaaaaaaatggaagctgcactgctttctcttcagcccttcccttcctccgccactcaacgacgtctctctccgtttaacctccacaatacacttaccagaccttcttcttatgctcctcttcgtgctcaaaaggtttcactttttcatccaattcaatcttcttgtttctatcttatcctcagaattgtatacaatatgtaaatttcagtgctgattcattgattctcaaaattgatgaaaatctatgattcgagagttggtatcaatagcttttcagcttcaggagtttggaatcgatgttagtctggaatcacagaaggttctgattcnnnattagaggctaaagtaagtgagcaagaagtgggaatgtaccagaatgaagtagttgagagtcaaggtataaggataaggagaagaccacctactggacctccattgcattacgttggaccttttgagttccggcttc

SEQ ID NO: 437 - DNA, 500 bp, Arabidopsis thaliana
ccacgcgtccgcgagaggaataaattcacacgcgaacttcgatagttgttaattttcgttgaacacaagtgacgaatttgagagagaaaaaaaaagaaaatcagagataaagaatttgagtttcttggaattaaaggatcgattttgttgaagtgaaattgaaattgattgtgaaaagagaaagagactgatggtagcagaagcagaggttgtgtttcaacagagtttaccggcggttctggagattgagttgtttgacggagtttcctccgccgttaaatctcccgtttcttctccgaaattgggttttactcagtcaacggcgtcggtttccggaagtttaacgacttctcctgtgcaggctgatatctttccagagggtgattgcgatcctagtgtcttggattatattccgaccatccggtctggaagctttgctgatattgggccaaagagaaacatggaagatgaacacattcgcatagacgatttatcttctc

SEQ ID NO: 438 - DNA, 500 bp, Arabidopsis thaliana
tttttttaaaacaaaagattagtttattaataaattcataatgaatatcaataaactacttacaacaaaaaagtattcctaactaagataaagatctttgacaaaaaaaaaaactaagataaagatatactataatctaaacaattatattctgttttaactaaaggtaacagaggtttttaattgtttgatgaattggacatcttcaattcttccaacccaatgcctttagctcgctctgcttcaattccacatgcttccctagcccaagatctgaaggaagtctgaatccacctatacggacacgcttcaatgaatgaacctcaagcccagcatttttcactaattccctgacttcatgatttcttccttcgtgaaccactatacgcagccttgctcttggtatatcatgctgctttggcatcaactcaactgaatctgggacacagtggactccttccaccattgtgccttcactgatagccattaagtgtcgtttg

SEQ ID NO: 439 - DNA, 500 bp, Arabidopsis thaliana
ccacgcgtccgaaacacaggagaagatgaatagtacagtctccggatgaaagactattcatttgctatggaattgggctgaagaaaccatcatcactggatgttgatgtcgtggaaagatggcaagactgcaaccagaggatctccataacctacggagtctgtttgcacacgaagcatgagttcatatcaattcacttatataatttctgaatgttcatactaaatgaaacggtttgaatactcaaatgtttacctccgtcatctgaaagaagcttaaggacttctccagctacatctgactgctcgacaaatagcaagatcgatgagtctgattagatagtttcaaagaagagatggatatattagttaagatattaccgtcactggaagttctgttcccaactgatgtaagtatccaataacttggccttcctttattgtatcaccctaaggagtttttttcacttagctctttgatcttaaaaaaaaaaaaaaaag

SEQ ID NO: 440 - DNA, 500 bp, Arabidopsis thaliana
tttttcacttctctacattacaggctttttttttttatctccacacaaattacaaacaagcaagaccgtccttttcgccatgaaaatccgcggtaaacaacgcataaagaaagaaagaaataagaaaaagaagaaactgcggatgtatttatcgacgcgttctatttggcttcgcttcgtttgttttaggctttagcttctgcacgagcagtggctttgttggcaatgagctgctcatagagatctctgatcttcaatccaacaatggtttggaaaagaccagtaccgttgttgctacccgggaaatcagcatgtttgagcatttgttgagtgacttctccgtagaatttggtcgagaggttgctcaagtgactttccacgtaaatcagctcgtccagtctatcaaattgtccatccatctccaaaactgatacctcatggtcgaagtaggagtcaggttcgtagttgaacttgatgccagggtacgagcaagtgagttt

SEQ ID NO: 441 - DNA, 500 bp, Arabidopsis thaliana
ccacgcgtccgaggagaagaaacaaagccgtacaacgagggctcttcctgggcaacaaaaccaccattttcgttttatctcaatcttcgtctctttcgaaagatctaaccacaacaactccttaagatggataagtatcaacgagtggtgaagccgaaagcggatacgccgattgatgcgaatgagattcgtatcactagtcaaggcagggcacgaaactacatcacctatgcgatgactcttcttcaggataaagggtcaactgaagttgtattcaaggcaatgggaagagctatcaacaagactgtgaccattgtagagctgattaagagaaggatccctgatcttcatcagaacacatctattggatccacagacatcacagacacatgggaaccaacagaggaaggccttctacctttggagactacaaggcatgtgtcaatgataaccattaccctatccaagattgagcttaatacctcctctgttgggtacca

SEQ ID NO: 442 - DNA, 500 bp, Arabidopsis thaliana
  misc_feature (1)...(500): n = A,T,C or G
cttttttttttttttttgcgtgtattaaatacttgtctattaaatactatagtatcaactattgttattttccttttataccctttttttagttgacgggttgaagcaaaaagggaacttttaatatttttttctattttctttgatatctatatgtacatgcccttatgtatctgtcaaaaaaggggaaaatttcttatttatatttaattcaatatttaaataaaattataggaaactgtaaatgagagtttctttctcacatacaccttcgatcacattacattgtcatctcggatgcatcaatatggaaatatttaattgatatctgaagccatgattatgattcgatttttgtttatttttaatacaaattgattcttaatacaaagagaatgtaggatcttgttatgttctcgaatcaaaaaaaatattganacgcccttttagttattactttgcaaaaagactctctttctctaggcaggaacgcaatatat

SEQ ID NO: 443 - DNA, 500 bp, Arabidopsis thaliana
ccacgcgtccgcctccaagtcctttcccttcgtctcccacttctcacttcacactgtgagtctgcgactatctccaagaccaagcttcatactttatttttgcaaattccgtttctaaacgtgtgatcagtatggatgaggaggcatctcggacagcaagagagtcactagagcttgtgtttcgcatgtcaaacatcttgggcacgggtttggaccggcatactttgtcagttctcatagctctttgtgatcttggtgttaaccctgaagctctagctactgttgtgaaagagcttcgtcgcgagtctatccccgattctgtcacaaccacaccatctatacactgatcaggtatgcaatggattatacaagtattgtggttggtatgtgaatcttgttactactttttttgtatcatttaaacaaaatttgtatggatgaattataacttcttttatttgtatgaaccgttatttgaaagccaaagtagcagaatgcaa

SEQ ID NO: 444 - DNA, 500 bp, Arabidopsis thaliana
ggtcgcggccgaggtacaaaccaccaccagagaagagaaagtgcccgccttatacaggtatggctcagtttgtaagtaactttgctgagcctggggatccagaatacgctccacctaagccagaagttgaattaccttcgcagaaaagggaaagaattcataaattgcgactggagaaaggtgttgaaaaggctgctgaggacttaaagaaatatgaccccaataatgatccaaatgctactggagatccatacaagacattgttcgtttcaagacttaactacgaatcctcagagagtaagattaaaagggagtttgaatcttatggaccaattaaacgggttcatttggtgactgatcagctgaccaataaacccaaaggatatgctttcattgagtacatgcacacccgtgacatgaaagctgcatataagcaagctgatggacaaaagattgacggcagaagagttttggttgatgtggagagaggtagaaccgtc

SEQ ID NO: 445 - DNA, 500 bp, Arabidopsis thaliana
aaggtaattaaggatcattggcttatataataaatagatttagaaaaagtaatcagtcaatgttgatcatcatcttgacaaattcatcataattgacttggccatcaccatccaaatctgcctcctttatcatttgttcaacttcttcatctgttagcttttctcctagatttatcattacatgactcaactcactggcagagatgtatccattttggtctttgtcaaagactttgaatgcttctttcagctcttcctccgcatcactttcctgaagttttttggccatgaggttgagaaactcagcaaattcaatggtgccgttgctatcagaatcaatctcagtgatgatatcatgaagttcttgttctgtcggattctgatccaacgaacggatcactgttgcaagttcttccaccgttatacaaccgtcgccgtctttgtcgaagagacaaaaggcttctttgaactcagtgatctgatcttttgtcagtgctgtt

SEQ ID NO: 446 - DNA, 500 bp, Arabidopsis thaliana
gccctttttttttttttttgtaactaatttttgctaatttaaatctttttaaggttgcatcatacataggactagttcatgagaaggccaatcatccaaaattacaatgacccacacagatagactatataacgataacgaaaaataccaaaacacccttttcccaccactaaaataaaaaatcacgatcgtggacgcaaggcttcaaaattcagcccatgagccacctgaccagcacaagcaacccacggattgatagaaacgggcctgtgattgtggtgatggttcgatgatgatgggccacccacacgctcgcacgaaggacacatgatgagtgtagttggtggagtcatctgaccgtagaattgtggagacagcttgagagttcgaagctccatagcctctttctgaagtctccggttctcttccgttagcttctctacgcaccgtttcaagtattcgcaatctacctccgtttgctttaacttggttctgtaaaa

SEQ ID NO: 447 - DNA, 500 bp, Arabidopsis thaliana
  misc_feature (1)...(500): n = A,T,C or G
cggccgcgcggcgatccacagttgctgagctctctacgcgtcctcttgtcccgcgttctagccaccgtccgtcacgcttctgcagatgccagaccctgggcagagctcgttgaccggtcagcgttttcccggccaccatcgctctcggaggcaacgtcacgagtaaggaagaacttttcctatttccgagccaattacataaccttagtggcaatcttactcgccgcgtctctgctcacgcaccctttcgctctcttcctcctcgcatcgctggccgcttcttggcttttcctctactttttccgtccggcggatcagccgttggtcattggaggacgcacgttctccgatcttgagacgctagggatactctgcctgtccactgtggnnnnnntgttcatgaccagcgttggatcgctcttgatgtccactctagcagttgggatcatgggcgtggccatccacggagcgtttcgtgctcccgaagacctgtttcttga

SEQ ID NO: 448 - DNA, 500 bp, Arabidopsis thaliana
ttcatatagagatattttcaacaacttgtccctctctaaactcatccaccttccaaaacagagaaggggaaaatatgacaccggctattttttctccgacgactcttcctccatcaactgctacatggccatgttcaacatctcagaagctcatcaccgttagatcaccactcaagttcaagtgtagagcaacttcatcatcatcgtctatcactgactttgatctttatgacctcttgggtattgatcgaagttctgataagtctcagatcaaatcagcctatcgtgcgttgcagaaacgatgtcatccagatatcgcaggagatcccggtcatgatatggccatcattcttaacgaggcttaccagcttctctctgatccgatctcgcgccaagcctatgacaaggagcaagcaaaactagaagaactcagaggctatacagggaaaccgatatactcggtttggtgtggaccagaaacagagcaacgagctgcgttt

SEQ ID NO: 449 - DNA, 499 bp, Arabidopsis thaliana
  misc_feature (1)...(499): n = A,T,C or G
taaaaccttaacttttcactgttttatttgttgcctcagtcaaagacacaccattctcctttagacacctttaactgtgcttttataagcagtgcgttgtgtaaannnctgaagtatgggacagagagccaggattgnnaggctacaaaatacattagtttcgcagaaaactaaaaagcaaagtgtagtacgttacgtgaaatcccaaaagatgggtcaattattgaagcgacaagcagaaatccgaaaccaaccaacttaagctgaaataattacttgatgagttttagcacgttgctatagcttaaccgagactttgaagatgttttgaagcagctaaaaggatccttcttcgtttcaaggtgcgatgacaaaaagaggcgtgtcaacgctgactggttttccatcttcagccagtagttccatgatggttcctgacttctcagcctcaatctcgttcatcagtttcatagcttcgataatacaaacaatttgaccc

SEQ ID NO: 450 - DNA, 499 bp, Arabidopsis thaliana
ccacgcgtccggctgtgttcagggggacgtttgattgatcagatggtaaaggtgggcaggtattctgagcaacgagcagctaatatattcaaggaccttatgctagtgatcaattattgccatgagatgggagttgtgcatagagatataaaacctgagaatattctcctaacagctgctgggaagatacagctggctgattttggcctcgccatgagaattgcaaaaggtcaaacactgtcaggattggcaggaagtcctgcttatgttgcacctgaagttctttccgaaaattattcagagaaggttgacgtttggagtgcaggtgtcctcttatacgctctcttgtctggtgtactcccttttaagggagactcattggatgctattttcgaagcaatcaaaaacgtgaagcttgatttcaacacgggagtgtgggagtctgtgtccaaacctgcccgtgatctcttggcgagaatgctaacaagggaagaatctg

SEQ ID NO: 451 - DNA, 499 bp, Arabidopsis thaliana
  misc_feature (1)...(499): n = A,T,C or G
ctcgaaggggtaggaaaactctgtccacgggctagttctgtgcatttgtgtgaccctgcactacacaagctgctgaactggtttcacagcgaccctactagtgtacccgtccatcttcatctcctccctcctcctcctcctcgttgatctcctcctcattcttcgttgtcctatccctcgtcttcctctcctctggcattgatccagctgcagctgttgattgattggctgttgtgttgatctgttgttcctccctcctcctcctcctccttctgtcgctatgtctaacggtgagctggagcagactcatttcgtggctggcaaggtgttcgtgttccaagtgcccaagctcgagtcgagtgaaggattcaaagctgcttcctggtccaagactcccctgtggactggtcgactgcgcgtggtgagtaagggggacnnggtgtcggtgctgctggagcacatcgacaaggagggcctgttcgctgcatgccccatccag

SEQ ID NO: 452 - DNA, 499 bp, Arabidopsis thaliana
tttttactctatgtgttaaatatgtttacttgttgtgaaaacgattacagatttaacgcaagtgattttctggagaggagtcggaatgggaggattgtgttcgtcggagattctatcggaagaaaccaatgggaatctcttctgtgtatgctttcacaagcagtgtctaataaatctgagatatatgaagttaatggaaaccctataagcaagcataagggtttcctttcgatgcgatttccggaacaaaacctaaccgttgaatatcatagaacaccgtttctggttgtggttggtcggcctcctgagaactcaccggtagatgtcaaaatgactgttagagtcgatgagtttaactggcagtccaaaaaatgggtcggctctgatgttctagtcttcaatacagggcattggtggaacgaagacaagacctttatcgcgtaagatcttcatgttgaatgcaacattctggtaacaagagaaaggtgtttgatgagtc

SEQ ID NO: 453 - DNA, 499 bp, Arabidopsis thaliana
cgctaagggtattaccgtccttttgcatgccaccgtccaccggatcttgtttcgtactcgaggtacgaccaagccaatagccaacggagttgtgtaccgagaccggaccggtcaggctcacagagcttacctaaaggaaggcgccttgagtgagatcatcctatcggccggaaccctagggagcccacaacttcttatgctaagtggtgttggcccatcggctcaattacaggcccaaaacatcacggtggtgatggaccagcctcatgtgggtcaaggcatgtatgacaaccctatgaatgccgtgttcgttccttctccagtccccgttgaggtctcactcattgaggttgttgggattaccggggaaggaacatatgtcgaagccgccggtggtgaaaattttggcggaggtggtggtggttctagtggatcgtcctccactagagactactatgcaatgttttcaccaagggcaacattattagagtcaaattca

SEQ ID NO: 454 - DNA, 499 bp, Arabidopsis thaliana
ttttttttttttttttaagataacaatgaaccgtttcaactgtcgagcaaaagtcttacaagtagtgatagttgagagttttgacccacaaaccacaatcaaagcccccagaatcaattacgaggaaacgaaaaaccaaacggtccaaaccctaaacctaaatcgcttctcaagtcattaaacatttaccacacgcgagtttaagtttgttcaaaagagcccacagaaacatcaaaggaaatacaccgttaagatagtgcaataatttgacagaagcgctcaacaatactttttcatccagacacttccccgctgaaagcacaaaaatctcagacaagctcttttagataagatcagctacattcattggcatctcatcaatctgggtactgtagtactgctcaatgtctctgagaatcttgatgtcgtcgcttttaacaaagttgattgcaacacccttacgcccgaatcgaccagaccgcccaatacgatggatgta

SEQ ID NO: 455 - DNA, 499 bp, Arabidopsis thaliana
  misc_feature (1)...(499): n = A,T,C or G
gcctacaagaggaggtgaaagaatcagttgaggaagagacagaagtggacgcagaggcagagggaaacgcaagtgcagagaaggaaaagaagcggtgtatcaacctgaacgcgtttgagatcatatctctgtccacggggtttgatctctcgggactgttcgagaagggagaggagaaggaggagatgaggtttacatcaaacagagaggcatctgagataacagagaagctggtggagattgggaaggaccttaagatgaaagtgaggaagaaggaacacgaatggagggtgaaaatgtcggctgaggctacagtggtggaagcggaagtgtttgagattgcgccgagctatcacatggtggtgctaaagaagagcggtggagatactgctgagtataagagagtcatgaaggagagtataagaccggcnttgatcgactttgtattagcttggcactgaaacatattctatcctttttatgtgtcttcttcttttag

SEQ ID NO: 456 - DNA, 499 bp, Arabidopsis thaliana
  misc_feature (1)...(499): n = A,T,C or G
cgggcaggtctattactgcttttgttacgaaagacaaaaaaacaaaacaaaacaaaagtcagctcaggcgaagaacagntgnntcgnnccaagcaaaccgctcgtaagtccaccggaggtaaagctccaaggaagcaacttgctactaaggctgctcgtaaatctgcaccaactactggtggagtcaagaaaccacatcgttaccgtcctggaactgttgctctccgtgaaatccgtaagtaccagaagagtactgagttgcttatcaggaaactgccatttcagaggctagttcgtgagattgctcaagatttcaagactgatttgcgtttccagagccatgctgtcttagctctccaggaagctgcagaagcatatcttgttggtctctttgaagacactaacctttgtgccattcatgccaagcgtgtgaccataatgcccaaagacattcagctcgctcgtcgtatcagaggtgaacgcgcttaagccaaccaag

SEQ ID NO: 457 - DNA, 499 bp, Arabidopsis thaliana
ttttttttttttgtcgataatgagatcacatttgaaacactttaagaggttttagagtgaaatcaagaacgttacaaatagaacttttagacatggaaagaggacttgaaactccaatacacaaccgaatattcaaataaagaaagtaattcttttttatgttctttttcatatatacttgtatacacatatagaataaatttggaaggtaaaaggaacaagatactatgactaaaccaatcgtagaccatctaggagttgttgatcatgagaggagtcttgagatataaacttgcggcaagcataaagcactgcagaatgaaaaccaattgggttgtctatgaacacaaaatgaccaccctgtggaacccgaatgatttcgcaagggaccttcatggatttcctcgcttccaccgcaccttgatagttcatccaatcattcattccatagataaacgttgttggcactttccactctgatgcactttgtaagaggggc

SEQ ID NO: 458 - DNA, 499 bp, Arabidopsis thaliana
ccacgcgtccgtgtttgaaaaggttggtctggactacgacgagtctgttgtgataagagtaaccggttgtccaaacggctgtgcaagaccgtacatggctgagctcggtctagtcggggatggtcccaacagctatcaggtttggctaggaggaacaccgaacctgacccagatagcgagaagtttcatggataaggttaaggttcacgacttagagaaagtctgcgagccattgttctatcactggaaactagagaggcaaactaaagaatcatttggagaatacacaacccgcatgggattcgagaaactgaaggagctgatagatacatacaaaggagtttctcaatgagcacaacagagatcatctttcgttttataattcatgtaatgtaatgtctctgtctgaactgttactcttcggtaactctgatggagaacttgttctcgttttggtttgattttgtaccctctttttttttttttgtttttttggatt

SEQ ID NO: 459 - DNA, 499 bp, Arabidopsis thaliana
ctttttttttttttttttaccacgttaaagaataaaacttgtaagtagatcataacatatgaaaatacatagctaatcaatacatatatgaattataacatgtaattttaggcccaaatatagcataaacatcatgggccaacaaacaatacatatatcaatctcttgaacaagcataattcaaataataatgatagcataaattcattaaaaccctcaagagtagtaacttatgcgtctctgtcccttttacattcagctggcataaccgggaacctagtccggtcggtacagtagttgtagatggtccacttcatacgaacccatttgagacgacgccattgttcagcgtcaaggtcacggaactctttctgatcccaccacatgcggccttgtgtggcacagtacttggcttccacagaagcttggcaaccatctatgtggaatcctttgtaagatgcaacgaaaggtgcattggcccaattggtcttctctaaac

SEQ ID NO: 460 - DNA, 499 bp, Arabidopsis thaliana
agaataattttaaacaatttaactaaattttttacaactccaaaactgaattaaaattaaaaaattccacacaaatgaaaattcgcaactaatgtacaaaacataaagttgagaaaaaaaaacacacttaaaaatcatcatctctggtttagactgactttttagttagtcatagcgagcctaaaatccttgagagcggtccgctcgtaacctctatatgaatcaagcttttaaccagcccggtttattaaaccggagcaatccggtacggtcaataatttgtgtcattacattgaacagccaccagtaaccggtaaaggcattgtagctttgataccatccaaaatagtcttagagtttcctccacatttcattgtctgctccaaaatattcactagttgcatgaatatttccatcctcgtcacgtcgcgactcgcctcaacagtgaagcgagcccaaatcttgtctactcgagtttcgatgactcccttcaagatcg

SEQ ID NO: 461 - DNA, 499 bp, Arabidopsis thaliana
  misc_feature (1)...(499): n = A,T,C or G
gcggccgcgctgaagcctctgtcacctcagctgaagtcgaggaatcggtatgtgtcccagctgaagtaacaagtgaagaggttccctcgtcagaaactcccaaggtagtagaagaagaagtgatagctaccaaagctgaagatgattcgccggaaaaagaagagcaaacggaaacacttgctgcagcagctgaagctgaagaggtggttcctccaattccagaaaccaaaagtgaagaggaaattgttgagaactctattcctccaaactcagccactgatgaagtttcatctccagaagctttagcaagtgaagaggttgagaaggagcaagtggttgccgaaacacctgttgatgaagtcaagactcctgcacctgtagtcacagaagcttcttctgaggaaagtggcaacaccgctactgctgaaagnntcaaaggcatttcaccagctctagtgaagcagctgagagaagaaacaggggcaggaatgatggactg

SEQ ID NO: 462 - DNA, 499 bp, Arabidopsis thaliana
cggccgccgctcttggagtagctgctgctgctggattaagtgtttttgcatttacagagattgaaaccatactccaactactaggttcagctgcacttgttcaacttgcaggcaagaaacttctatttgctgaggaccgaaagcaaactctaaaacaggtggatgagttcttgaacacaaaggttgcccctaaagaacttgttgatgagttaaaggaaataggaaaggctcttcttcctcaatcaacaagcaacaaagctctcccagcaccagcaacagtaacagcagaagcagaatcagctacagctacaaccaccacagtcgataaaccagtacctgagccagaaacagttgcagctacaacaaccactgtagataaaccagtacctgagccagagccagtgccagagccagtgccagtgccagcgattgaagctgcagtcgctgcacaagtaatcacagaaccaaccgaaacagaagccaaaccaaaacctcattc

SEQ ID NO: 463 - DNA, 499 bp, Arabidopsis thaliana
tcttttaaagggagtccttactggatggcacccgaggttgtgatgagccaaaatggctacactcatgcagtcgatatctggagtttgggttgtactattctggaaatggcaacatcaaagccaccttggagccagtttgaaggggttgctgcgattttcaaaatcggaaacagtaaagacaccccggaaatacctgatcacctttcaaatgatgcaaagaattttataaggctttgtctgcaacgaaatccgacagtacgtcctacagcttctcagcttctagaacacccttttctacgtaacacaacaagagtggctagtactagtttgcccaaagacttccccccacgttcctatgatggaaacttctcactgcagcctacaagggaaccctatccagggagactgagccatgataattatgcaaaacagccattgtctagaactataaagagcccgagcagagaaaacgtaagagctatcacatccttaccagtat

SEQ ID NO: 464 - DNA, 499 bp, Arabidopsis thaliana
  misc_feature (1)...(499): n = A,T,C or G
ttgcttttatcgccagcaccatctccatctacatgcatgggtacagaaatatcaggatcttgggatccaacccggttttcctcgggtcgggtgtctagatctctggctgacgtggccnnggtggcggtggtggcggtggtccctgttggtggttggctgtataaagctgtgagttggtgaaaataaggacaagtccttgagtcaagtggtctcttcttgttaacatcttttgtcttcctaaaatacttgttgatgttttcccatttctctttgcatcttttggcacttctcttgtacccaatctccaacattttcttggatattctttcccataatggaacagcttttgaagatgttgataatgagttctcatctttatgatcatcatcattcatgttactgatacttcttctaatgttgatcagagccaacacttcatcctttggccatctcttgccaagatcacttttatcatcgctttttggaggttttgggtttt

SEQ ID NO: 465 - DNA, 498 bp, Arabidopsis thaliana
agatcttatcttccatgcccgtccaagattgtgtgagtaacaaacatagaaactgatgagttccttacactggagaccccaatggcagataatgcttccatagaaactggcataaaagccccgatacctggagtagacggcgagaaaatcggtaagggtaagtcttggttaaggtattgcaccacttgttccatcgcaggccttgattctggcatagcatttgtgcagagtaacccaagtttcagaaccatctcgacttcctcgggtaagaattctactcccaatcttggatctctggtcttgaataagcaagcctctttccagcattcatagacccacttgaccaaatattgctttccgactggtagctcaggttccactggtcgcctgccacaaattacttcaagaagaaaagcaccaaaagcatacacatcggttttcatagacgtgcccattgttattagttcaggtgccatgtaacctatggttcccacagcg

SEQ ID NO: 466 - DNA, 498 bp, Arabidopsis thaliana
ataacaaatagagaacaagtatcagtatacaagaacacaattcaaaagttccacggcagcttcttagatcaagtccgtgctttaatatcctctgaaagtgttggtgatcattctttaataggtctaggagggacttcaagagcatctgatgattttttctttcggacaatcttggctcggcaacataggcaaagaaacaccaaggaaacaataatacctgatactatgagaatcaagatcaacacaccacctattatccatctaatattagatttgcccgaactgcatgataggctatacggatccttacaatagcagaggaacgtacttgaggtctgattatatccacaagaaccctcagagtcacttggtggacgacatttaactcctggtgttaagttttcgttgaagacatgacatcttccaagagaggataaacattcctgacatgtattctcattgatcaccaccgtcacctcaaatccttttcttaaaaca

SEQ ID NO: 467 - DNA, 498 bp, Arabidopsis thaliana
ttttttttttacatcgtatctctcattgattttattatccttgtcgggattttatttgaaaggggggataaattaaaaaaggacatcatcaaaggagtacgtaaaagtccgaacgatattagaaaaagaaacacaagatttgctaataatatatgagcttcaacacacgtgtctcccgcagaggctttgttaaattctcactcaccatattcaggcgcccgacgggggagggacggtggcatcgtcggaatcggatttgtccttggaggagctcagcttcttgaacaatggcttaaacacgagctctatcgccaaccatcccaccgccaacactcccacaacaaccgtcgctgtctgtttcttgcctgttggtttctccagttttgggaaattgacttctcctcctgacttctccaccattgctgctgcttcttcttcttccttatttttcttcttcacttacacaccgtttgtcttcagactgaattatcttcaact

SEQ ID NO: 468 - DNA, 498 bp, Arabidopsis thaliana
tacagatcccttccttagtcagagtttttggttattagtgtttagaggtttgtgatgaacaatcgaggaaggtaccctcctggaattggcgctggccgtggagcctttaaccctaaccctaattaccaatcacggtcgggttatcaacaacatccgccgccccaatacgttcaacgcggtaattacgctcagaatcaccaacaacagtttcaacaagcgccgtctcagccgcatcaataccaacagcaacagcagcaacaacaacaatggcttcgaagaggtcagatccccggcggtaacagtaacggtgacgctgttgtagaagttgagaaaactgttcaatccgaagttatcgacccaaactcggaagattggaaagcaaggctaaaactacctgcacctgatactcgatacagaacagaggatgtgacagccaccaaagggaacgagtttgaagattactttttgaaacgggagcttctcatgggaatatatgag

SEQ ID NO: 469 - DNA, 498 bp, Arabidopsis thaliana
  misc_feature (1)...(498): n = A,T,C or G
aacgttgttagctctctgggaagatcatgaactgaagtccttggctcctctggctcccatacatgcacttttggatttctcaagtaatatggatcttagagagagttttgatagagggaaggagcttcgtcttcaacggattattagttcagcaattgatatcacaactaggcagaagaagggttctcaaaagtggctattctttgacaatcaacggactcatttctacacaacttcgggtgaattgcaatgcaacggagagctctttcatggaaatggagagggtagaaacagaaaatgcgttactattggaccagttgaaatcattcctttggagaatgaaagatctgttcctgtnnnngaggaagaagtcattcttctcnngccgctcgtaaggtgtcaatctgctccaatatattcttctggcattgcagcaaagccacttagctctgattgcacaacttcaggaaatcaaacaactacatccaatgacagcct

SEQ ID NO: 470 - DNA, 498 bp, Arabidopsis thaliana
ccacgcgtccggatatttccgacacgaggcaaattcctagtggctcatggcgtcatcatctgatcacacggcgaagataatcgacggcaaggcgattgctcataccatcagatcagagatcgccgaggaagttcgcggtctatctgagaaacacggcaaggtcccaggactagctgtagttattgttgggagccgaaaggattcacagacctatgtgaatacgaagaggaaagcgtgcgctgaggttgggattaagtcatttgacgtgggcctaccagaggaagtttctgaagctgatcttattagcaaagttcatgaactaaattcaaatccggatgtccatggcatattagttcaactcccattgccgaaacatattaatgaggagcatatattgggtgcaatcagcattgataaagatgtcgatggcttccatcctttgaatattggtaagctagccatgaaaggcagagaacccctcttccttccttgcacccc

SEQ ID NO: 471 - DNA, 498 bp, Arabidopsis thaliana
ccacgcgtccggtgagaatcttcgagaaaacctctccttctcgtttcatctctttcactatccctaaccctaattctccgattcatctcctccgcgtcgccgtcctcgactcgcctgttcattccactgagtcttctcctccccgagtcgccgccattctcgtccccaagcaccgagaatccgattggatcttctccactgagtccggtcaattacagcttctccttaacctgccagaaatctctcgattgatcttgatcggtgatgatcacgatactgactctgatttacctgcggtttatcaccgaccgaacggcgaagacgacgaatctgagaaactcgagataagattgaaacctcttgtggtagctttgttacctaaaaccctaacacgagaagaaatcgacgatgtgccttttctgatttacgatgataatgttgtctccagtgtagagattgagaaatgcgtcgggcctttcgttggtgaaatgttaattg

SEQ ID NO: 472 - DNA, 498 bp, Arabidopsis thaliana
gcggccgcgtcactccgtcgctaaacctaaaccgaagaaagtctacaacgctgaatcggttacggcggatggagcgaggcggtgcacgcactgtgcctcggagaaaacgccacagtggagaactggaccgcttggacctaaaacactttgtaacgcttgtggagttcgttacaaatcagggaggcttgtaccggaatacagaccggcgtcgagtccgacgtttgtattgactcagcattcgaactctcatcggaaagttatggagctccggcgacagaaggaacaacaagaatcttgcgttcgaattccgccgtttcagccgcagtaaatttgggggttttcttttcaagggtttttgtgatttggtgacgtgtcgtaatcttaacggtgatgatcacgtgaccgacgggaggggttaaggacttaattatcagtattagtttaaagtttgcaaatctctgctaattaatttgttggtaatttctattgatttttttc

SEQ ID NO: 473 - DNA, 498 bp, Arabidopsis thaliana
cggccgccgcgttactcgccggattcattaccttgatcgttaaaactgtgccgcgtcatcatcctaagactccgccgccggataattatactatagctctacacaaagctcttaagttcttcaatgctcagaaatctgggaaattgccaaagcataataacgtgtcatggagaggtaattctgggcttcaagatgggaaaggtgaaacaggaagcttctataaagatttggtgggaggttattatgatgctggtgatgctatcaagttcaatttccccatggcttatgctatgactatgttgagctggagtgttattgaatatagtgctaaatacgaagctgctggtgagctcactcatgttaaggagcttatcaaatggggaactgattactttctcaagactttcaatagtactgctgattccattgatgatcttgtgtcacaggttggatcagggaatactgatgatggaaatacagatcctaatgaccattact

SEQ ID NO: 474 - DNA, 498 bp, Arabidopsis thaliana
ggctttgcttaacccgccatatacagcaatattccctcattcatacaatcatcagaacaagacagatacatctttaggtaatggaggtgatctgagacttcatcttgagaagttggtagaagcggaaaacgttcaagatttcatcaagaaaaaccctttcgggcaagaagctatcacggaagtaagcgaatcgtgggagttttaccgagagatcattcgtatgctacgtatatcttctcaaacgtacagattaaggaacttcatacggtagaaaacagaggattgcttcatacggtagataacaaacgtaaaggaaagtagaaagattgactaaaacaacgtgatgttctgatgttgttgttacagatgtattggtgttttattttataagttgtataaccacaagtagttgcattttttcttgtgtagttatttattattaaaacttgtatttcatatctttattctcggttgtggtgttacttttttctttttaaa

SEQ ID NO: 475 - DNA, 498 bp, Arabidopsis thaliana
tttttttttttcaagatcatagattaaataacaaaagtggtgattacagtatccattacatgtctgaaccaccagcatcaataattatttcgaagataggagacagagaatcatgtgtacaatgctaagatgggctagtaattcacagtggatctgattgcatccaatatcttgttcttggttggcatgtagaaaggttcgaacactagagggaaaggagtgtccaggccacaaactctgcttacaggtgcttctaacctcaagaagcaacgctcaactatagttgcagcgatctcggccccaaagcctcctgtaacaggagcttcatggctaataagaagtctgccagtctttctcactgaggtctcaacgatttccttatcccaagggatcagagtcttgagatctatcaattcacacgatattccttcgttttctgcgtcaagacatgcttgttccatgatagtgagctgtgctccccatccaacaagagttatg

SEQ ID NO: 476 - DNA, 498 bp, Arabidopsis thaliana
ccacgcgtccgcataaacaaaatatcttcttgctcattattcatcatcaatctactactccgtaaactttgcttcctctgtttgtattagctcagaagagatatgggaagtactccgactgatttacccggtgaggatgtcgccgataacagatccggcgtcggcggtggtatttctgacgtctacggtgaggattccgccaccttggaccagcttgtcaccccttgggttacctctgtcgctagtggctacacattgatgcgtgatccgagatacaacaagggacttgcgtttactgataaagaaagagatgctcattacttaactggtcttcttccccctgtgattttgagtcaggatgttcaggagaggaaggtgatgcacaatctccgtcagtacactgttcctctgcagcgttacatggccctgatggatcttcaggaaaggaacgagaggttgttctacaagcttttgattgataacgttgaggagttgctt

SEQ ID NO: 477 - DNA, 498 bp, Arabidopsis thaliana
ccacgcgtccgtgagcttgacggtaaacgtatcaagcttcagatttgggataccgctggtcaagagcggtttcggactatcaccactgcttattaccgtggggcaatgggcattttgctggtgtatgatgtcacagacgagtcatccttcaacaacattaggaactggattcgtaatatcgaacagcatgcttcggataatgttaacaagatcttggtagggaacaaggctgacatggatgaaagcaagagggcagtacctacagcaaagggtcaggctcttgctgatgagtacggaattaagttcttcgaaacaagtgccaagacaaacctaaacgtggaagaagttttcttctcaatagggagggacattaagcagaggctttcagacaccgactcgagggcagagcctgcaacgatcaagataagccaaacggaccaagcagctggagcagggcaggccacacagaaatctgcatgctgtggaacttaaaaaagt

SEQ ID NO: 478 - DNA, 498 bp, Arabidopsis thaliana
acgcgtccggctttaaagaaaaagatggaattcaccgcagagcagctaagccaatacaacggcaccgacgaatcaaagccgatctacgtcgcaatcaaaggccgtgtgttcgatgtcaccaccggaaaatccttctacggctccggaggcgattactcgatgttcgccggaaaagacgcgagcagagctttgggtaagatgagtaagaacgaagaagatgtgtctccttctcttgaaggtctcactgagaaagagatcaatactcttaatgattgggagaccaaatttgaagctaagtatcctgtcgttggccgtgttgtctcttaggtctctcttctgagattgcactatgttatgtaactattgtgtgtgaggatctttgtgttgtgtgttttctgatttcgtgtttggatctgatcgttttgatacaattaccataagtaccaaattatctatgaaataaatcggggatttcgtgttaaaaaaaaaaaaaaaaag

SEQ ID NO: 479 - DNA, 498 bp, Arabidopsis thaliana
ccacgcgtccgagagagaccaaaaagagatcggaagagatggcttctacctccgcgatgtcattggtcacaccacttaaccagacccgttcgtctcctttcctcaagccattacctctgaaaccatccaaggctttggttgcaactggaggcagagcacagaggcttcaagttaaggccctcaagatggacaaggctttgaccggtatctccgcggctgctcttactgcttcgatggtgattccggagatagctgaagctgctggttctggaatctctccttccctcaagaatttcttgctcagcattgcttctggtggcctcgtcctcactgtcatcattggtgtcgtcgtcggcgtctccaactttgaccctgtcaagagaacctaagacctatatatctttcttacatcattattgtaatctgttctccttctgtgtattcgtttcaatgttgcagcaatgaacttttggataaaagtcaaaaaaaaaaaaaaag

SEQ ID NO: 480 - DNA, 498 bp, Arabidopsis thaliana
tttttttttttttttttttaatttataacataagttttaaattttattacaaagatgagaccatacgaaatgagaacaacatacaatatacacatttttggagttttctttgaaatggtaaactttacacaccaactctctctgttgttcatggtccataatcatcaatatgtagacttgaatggcttatagaccttaagatcaagcatcactccggcgattgatccaaccccggcgaccaccgagatcacaagacaagcaacactaagcatctgtaaacacacccatctcgtgctccatttctcaaccttcctctgcttaatatacatctccaccggaaaataaaccgtcaagggccaaaaccctaacgcccctaagatcccgaccacgtcgttaaaaaacggcatcagcatcgatatcacggtggttgtaacgacaaagccactcctgtaaaccatcctgaaaacgtttactttgtaaggagacttaaatccgggg

SEQ ID NO: 481 - DNA, 498 bp, Arabidopsis thaliana
gttttttttttttgtttttgtgtctcagccggaatgggtctgaagtagaagtacggacaagacaaagaaaccttgtctgtctctatacaaacattatacacaaattccaaaaaaaaaaagaagaagccttttcttgttatcttttttggtatatgcacatatagatttcctctcagatatatgtgattctcactcaggtcttctactcaaataggctttttcttcttctcaaggtacgaagattatatatataaattcacatcacatgcttctatataataatagtcatatagattaagaattgctaaaaggtgatccagaggacctgcgtatgcgtacccttttctgaggtgatctattcaaaaggatcgacgaatttcacgcccttgtcttgtgattctgctacctgttagaggaagagagctctggctcgagagttgcagctctgagaatggaattgacccaccgctctgggagaaaatcaaacctgccgagatg

SEQ ID NO: 482 - DNA, 498 bp, Arabidopsis thaliana
tttttttcaaaatagaactcaaagttgggattactctgcatgaacaagcatttacataacatatagtgatcaacatcgacactatcacccgtgggatactagttataaaattgaaattgatgcatatatagatgtggatattcaaagtcccaattggctctgcatctccaatatagtctttgccgatttctgcagcttctcagcctcttcatcagtcatatgcacattggtcacagcaaccacaccattccttccaagcaaagccggaagactgaggaaaacatcaccaccatcaacaccataaaatccacgagcaagaacagtaaccgggtggatcttgcgctggtcacggaggatagtacgagccagattagcaactgagtagccaatggcccaagaagtgtaacccttgagtccaatcacttcataggcgctaccaacaacagcttggtggatatcctcaagagtttgtttctcgtaagctatctggttcttctc

SEQ ID NO: 483 - DNA, 498 bp, Arabidopsis thaliana
  misc_feature (1)...(498): n = A,T,C or G
gcccttttttttttttttttatgaagaaagatttgagaatttttttttccttcgcagacgaacacagtagagtttcacagaaaaaaaaaaggattcaaacataaaattctacaaacgacaaaaaataaacctaagcttaacaatgatgaacaagacaatgtccgaaatcacgatgataatttgaaattcattagtccattaaaagcttttctaacctttcttcactctcgcaaattcttcgccggaaaagcttctccgccggtatatatannatgattatcaatatatacacatcagaaaggacctcttccaccggaattccccggccaaccttccaccggaagttgcacatttggttgcatattcatcggtaaattaaagaacggaagtcctcctcctcctccagctgccacctccggaaacaaattacctccgccgttagatcctcctccaagctgttgctgctgctcatcttcttctaaaggaagtctctcataa

SEQ ID NO: 484 - DNA, 498 bp, Arabidopsis thaliana
tcttctctcctagacctgtcaccgagcttgatgcagctgcaactacgttacaaaaggtgtacaagagttacaggaccagaaggaacttagcagattgtgcggtcgttgttgaggagctctggtggaggactttggaaggtgcagctttggatttgagctctgtgtctttctttggagaagaaaaacatgagaccgctgtttcgaaatgggcacgagctagaaaacgagctgctaaggttgggaaaggcttatctaaagatgaaaaggctcagaaattagctcttcagcattggcttgaagctattgacccacgtcatcgttacggccacaacttgcacttctattatgatgtctggtcagcgagcaagagcacacaaccattcttttactggttggatataggagacggcaaagatgtaaatcttgagaaacaccctagaagtgttctgcaaaaacaatgcatcagatacttaggaccgatggagagagaagcatatg

SEQ ID NO: 485 - DNA, 498 bp, Arabidopsis thaliana
tatcttagggctatagttatggatattttcatggatttcttcaataaaccttctgttacagagacattcgtcgacgttttgctatgtgtagttccgatttgggtcgctgttatgatcgggcttctgatcggttggtcttggcgtcctagatggactagcttggtttatttaggtttccgttctaagcttcggtttctatgtactgttcctcctggatttggtgctcgtcgtatttggcttgctttcaccgctctctctgctttttccgtttgttcaagactcggtccaacctccaataaatcctcggttaatgacggttcctctaaaccggtcgaagaagaagcattttcacgagctagtgataaagttacagagaaagagaaagatgttgtgacagagaaggatttagagcatttgttgcatctgcttgaagctggaaatgctagttttgagtggcaatctatgatggataagtctactcctaatatgagctatcaa

SEQ ID NO: 486 - DNA, 498 bp, Arabidopsis thaliana
tctcagatctttagttttgccggtgaaaatgatttttaccgtcgtggcgcaatatacccaaacccaaaggatgctagtcttttgttatcgcttggtagtttcgctgatgtttatttccctccaagcaagagatcacgtgttgttgcacctacgatcttcagtgctttcgagaaaaagccagtttccattgatgtgctaccagatgagtgtctttttgagatctttaggcgtttgtctggaccacaagagaggagtgcttgcgcttttgtctccaaacagtggcttacgcttgtaagtagcatccgtcaaaaggagattgatgttccttccaagataactgaagatggtgatgattgtgaagggtgtttgtctaggagcttagatgggaagaaggcaacagatgttagattggcagcaattgctgttggaactgctggtcgtgggggacttggaaaattgtcgattcgaggtagcaactctgctaaagtttcagatctt

SEQ ID NO: 487 - DNA, 498 bp, Arabidopsis thaliana
ccaaagaaggaagatgactttaattcttatttaatttccctttctccttttgcttcaccaaaatccacacattcatcaattaaaaaacaaaccctagattcttgaaaactggaactcattcacgaatcctaaaaagagagctcctttggttttcttgaaacccagattcttcaagctcagctatggcggtcttcaaaaccctagctttcctattcgttttaagcatcgtgatttaccaatcagtggctgttacagatgtaaattcatcgttttcctttaatgggtttgtgaaagctccaagctttgacaataatgttgctctgtttggagattcgaagctcgttcatggcggtccatcgatacaattgactgactcagtgagtcgcagtgaagggcgagttatttacaagaaacccatcagactgttccaaggtaaagagagaaacttttccggatcattctcaactagtttctcgttttcgatgtctgatgagattg

SEQ ID NO: 488 - DNA, 497 bp, Arabidopsis thaliana
ttttttttttttttgttttaaacaaatttttacagaccacatagttaagtgggaaattgcttcaaatactatgaagtttccgatacatccatagtacaatacaagaactaaattaagagtgcaccgttagtttcttcctcccaaaacatttgaatttcacattttcatcatcttctgtacaagtatttggatagtggaaagctaagactttttgcaaccttctgagccagatcttcagagaccatagaacggtacctaatagaaccttctaatgggcagcttccgcttttgattaaaaagttagcatcacatagacttgacacttgcagcagaatatcagacatcagattgttattctctttgtcgtaacccgttgtgttttcttcttcttcgtcctcttcgccaaatgaagaatctccaacggaggcaatacattggaatatcgccaatagtctttccagtggaaagcttccaggtcctttcatgactgcttcctg

SEQ ID NO: 489 - DNA, 497 bp, Arabidopsis thaliana
  misc_feature (1)...(497): n = A,T,C or G
ttttttttttttttaacttatcaaattctctcaagaatcaataataaaatgttaatccaacaaatctacaaaaatttgcaagtgtttaaaaatataaaacatctaaccagacttcaatcctcgacctatctactatgtcaaatagacatgatacaaaaatagaaagtccccgttgatgactgcttctgacaccaccaatgcttccattgccgctcacgctatcggcattaccaccgctactgctaccaacgtgtcataccagctgctactatcaccgtttccacttgcatgaattttcttgtgatggccgtaatagtggtggcagcaacggttannnggatggcttaacatgttcgtagcagaagcggtggtgattttggctgtcgctgaaaannntgatagcacaactggtaacatatgttgtatttattgaggtagaagtacgaacctttatcctcacaatcagaaagttaagactaagcgttgttttacattta

SEQ ID NO: 490 - DNA, 497 bp, Arabidopsis thaliana
tggaaaaagtgggagcaagagacattatctaatgactatgagttttctattgatcattcaagacttaggctcactcatgagacttcttttgtgagagaacatacaagtttctggacaacaactcctttcttcttttacgtcggatgcttctttaggcagttctttgtatctgttgaaagaaccgactacttgactctgcgccatggattcatctctgcccatttagctccaggaagaaagttcaacttccagagatatatcaaaagatctctcgaggatgatttcaagttggtagttggaataagtccagttctttgggcatcatttgtaatcttcttgctgttcaatgttaatggctggagaacattgttttgggcatcgatacctcctctactcataatcctagctgttggaacaaagcttcaagcaattatggcaacaatggcgctagaaatcgtagagacacatgcagtagttcaggggatgcctttagtgca

SEQ ID NO: 491 - DNA, 497 bp, Arabidopsis thaliana
tcgagcggccgcccgggcaggtgaaggaacaaaaatgcaagccatcggtagcagccatggcaggaggctctgcttcaaccactatctctccgattccttctccaaattcctctctccctcttcttctccttcccttctccctcagagatgccattcgttctgtatccccaagcttggaagtagtagtaccaatgagaatggcagaggaagaagtgtaacagtgagagcttcaggagatgaagattctaatgagaactttgctcctcttgctcctgttgagcttgaatctcctgtaggacagcttttggagcagattcttagaactcatcctcatcttttacccgttactgtcgatgagcagctcgagaaattcgccgcggaaagcgagactcgtaaagctgattcgtcttccacacaagacattctccaaaagtaagtctttttgcttcaagtttttgagtgagactgtgggagaatcttgcaatgcttaagtacat

SEQ ID NO: 492 - DNA, 497 bp, Arabidopsis thaliana
tttgagtgtatcttggtgttcctagcttctcccgacgatcaatccactccttccttagcttagcaagcccaatgtgtgcattaacattttgaggaccactagtgtcataattatcaaaagctggctcaccaccagacaaatgaacacgacgaaagggaactttaagaacatgaccagattcttcatggacaacttccttgtgttctttagtgctcttaggaaagcattcttcaaaagatggaattggttgaaaatcaggagaagaaggatcaatggtgtgttttctctgcttagctctctcagaattagtggttggtggatcaaacgtcaaagtggctcttgtggttgttgtttccttcttgaatcgagtagcagcagcttgaacaacaacatcgaatccaggtaacaaagacgagtttggaagtttcggccgagcagagtgattcttgttgttgcatacgacggacatcaaggtacagtgtactgaagcagccata

SEQ ID NO: 493 - DNA, 497 bp, Arabidopsis thaliana
acaacattaaataaaaggaagtatccatcataaatattactagagactataggacacttcaaattctagagcaacacaaatgacaagataattaattaagattgtttttgatataaaccaacaaacaaactgagaaatgaaactctcttaacttcagactctaggctttagacgaccttcattagcaagcttgaaggtatgggcctgctttgtggctgccttgtttgaggaaagtcctgcaacaaagtggtctctaacttgaggggttgtgaaagggaacttatggttgaccatggagtttaaccaagaagctgtgccttcacggtagagagcaccaatgggatcagagcgggtgttggaaagtgcctgaagaaggttcatgtgaggatcaaaccctggaatgctactgggaatactgactgtaccaaaagctcctccaacagttccccaccatccaagcaagccccatatcaatgtagggtggtttctccagtaat

SEQ ID NO: 494 - DNA, 497 bp, Arabidopsis thaliana
ttttttttttttttttgaaaaacacatgcatataataaataaagagcccacatacatcatacatgatacatcgcaaatatgacaattgacaaacacatgcatataatagataaagagccacatacatgatacattgcaaatatgacaaacacgtgacatgcatataatagataaagagccccacacatcacaaatgaaacaaattaacgtgcatacatttattgacgcaatttcgtagctatagtgacatcagtgacttggtgagttttttgggaaagcctttgagggaggaggaggataacagaaagggcaccttctgggacgatatggtggtaactgcggaatagttggccgccgaggcggaaaacccggaacatgaatggggacaatgggccgagtaaaacctagtggatcagcataatttatctctccaagttcacggagttccattcgtgcgccaaggacattatctatatgtggaaatacacggacgcgtg

SEQ ID NO: 495 - DNA, 497 bp, Arabidopsis thaliana
tagttatgtttgttggattacaaggtgctggaaagacgacaacttgtactaagtatgcttattatcatcagaagaaaggatacaaaccagctttggtttgtgcggatactttcagggctggtgcgttcgatcagctgaaacagaatgctaccaaggctaagatccccttttatggaagctacacggaatccgatcctgtgaaaattgctgttgagggagtagatacgtttaagaaagaaaactgtgatctcattattgttgataccagtggtcgccataaacaagaagcttctctctttgaagaaatgcgtcaagttgctgaagcaacgaaaccagatcttgttatatttgttatggatagcagtattggtcaagctgcatttgatcaagctcaagcctttaagcagagtgttgctgttggagctgtaattattactaagatggacggccatgccaagggtggtggggctcttagcgctgttgcagctacgaaaagt

SEQ ID NO: 496 - DNA, 497 bp, Arabidopsis thaliana
ttttttttttttataaggaaagtttcagactttttatagataaccaaatcaccacacaaacatagaattttaggagacatcaatggaaataagaacatcaaagcatagattacacacacgctctcacaaagagaaatcaaactgaatcagtttggcattaacttcaaattttagactagagaggagaaattattggattttaagattcaggaacggaggctgctggtacaccggcggcgactgctgcggctgcagagcgtttgatggaagcggatttgattaagtggttgtaacttcccttctccttgaagagctgagcgaaatggtgcttgcagtacaggattccttcaagagctgcgtagttggaaggtgaaattgggcaacctccatgtgagcacttgaagcaggacttgtgatatgtctggctctcgactgttaccttttcaataggatacacagttttactacaagtggcgcatttctcttgtgtaccagag

SEQ ID NO: 497 - DNA, 497 bp, Arabidopsis thaliana
cttttttttttttttttttaggtaaatgacattttatttagagtagtgtccacattgtctgaaataaagaaagacgaatcatgttgtatacaattatcatttattcttatttttgataatgttattggtttcatgaacctagcttctagtagggcataggtgggatactctgctcgtgcctgaagaagttctctggatcaaccttggttttaatcttcaccaatctgtcaaaattgcctttgaagtacttaggtccccagattttagcttcaatgaagttaacctttgcgttgttcttgttctgtccgaagtctagatctctgtagttcacatatgcttgtcttggattgcttgagacataaggcgccatgtaattgtatatctctttgatccagttgatttttctactcgatgtcttgtcattctctagccagttcgcgtaatagagaatcttgaagagggttccgtttctatgcggaaatgggatcgcagattca

SEQ ID NO: 498 - DNA, 497 bp, Arabidopsis thaliana
ttctctctcgatatcatctaaatctctctcttgatctcaatttcgcaaaatggctgacaagaagatcagaatcggaatcaacggtttcggaagaatcggtcgtttggttgctagagttgttcttcagagggatgatgttgagctcgtcgctgttaacgatcctttcatcaccaccgagtacatgacatacatgtttaagtatgacagtgttcacggtcagtggaagcaccatgagcttaaggtgaaggatgacaaaactcttctcttcggtgagaagccagtcactgttttcggcatcaggaaccctgaggacatcccatggggtgaggctggagctgactttgttgttgagtctactggtgtcttcactgacaaagacaaggctgctgctcacttgaagggtggtgctaaaaaggttgtcatctctgccccaagcaaagatgcgcccatgttcgttgttggtgtcaacgagcacgagtacaagtctgaccttgaca

SEQ ID NO: 499 - DNA, 497 bp, Arabidopsis thaliana
cataatccaaacttcaacaaaacatcttccacaatccaaaacaggatccacatttttcaccatgggaaatgaaccctaggaactaaaaaacacgataacaaaacgctcaaaatgaattcctcacgaaatagaaaatttcttcagaacctgagcttggtaaagaaccatctgttcttaccggttttgaacctctcctcaagcttagccttagcttccttaagagcagcaaccttcttatccttactctgaagagcatcaagagtcgccacttccttgagatccacgtcgagtgtgtaacgagtaggcatcagatgctggtaattaacaagcttgatgaaacacttaaccctagatttcttagctgtcttcttagctgagtctttgcggatgactttgctcgggtacttcttgagtccggcgacgaggcagtgtccgtaaggacgatcacggttaccgtcgtcgaaggatttgatgatgacggctttctttccggcgta

SEQ ID NO: 500 - DNA, 497 bp, Arabidopsis thaliana
ttcttttattaatatactaaaaacaaataattaatcattaaatgattattaatagaataactattgttttcttcacttatctccgtcacatgagctaagagaaatcagagaccaaaagttcaacgagaaattctcactagatctcttagtaaccatggagcctgagatggtgcgactacccattcatgagcactggctgacacctgcaagagataatcggtggggtaaatgttgtggactccaattcaaaactatcagtgatggctacaactgtagaaaatgtggttatttcttccataagagttgcagcaactgccctaaagagatcaaccacccttctcacaagtgtgataagaatctttctcttattacaaattttgccagctggagtgtgagatgccgtacatgtaaagagacaatccagccctatatccagaactatgaatgtcagcgctgtgaattcaacatccatttggattgtgtcaagtacccaccac

SEQ ID NO: 501 - DNA, 497 bp, Arabidopsis thaliana
tttttttttttttttttaatcataaaaatgaaagcctcttccataggcagaaacttacacaaacatttgagaattcactacttagacattgtctcttgttactaccgagttaaaaagatttacattactctcctcactccatcaacttctttgaattgttccatctctaaccaccatacggtaagccgagcctaagggaagtgtcggagctctcggagtcaacaggcgctccggtagagtttccggcgttagtaatagactccgacgactgtccttcctcgtacacagcagcgttctccgattcagcaccaccgtgtgcatgcacattgttacatatttgcatgccaagtcgctcgttctcttccgttagttgcgttccctgcaaaaatcaagacaaaacatatcattaagttctctagctaagtatttgcattttgtgtttttagtggcaccatgtgttttgaatttctctagagatcaactaactacgaatgagc

SEQ ID NO: 502 - DNA, 497 bp, Arabidopsis thaliana
tcctaagaaaagaaccctaatttttattatctgcagaaatcatcatcatgaacgagattcatcaaccgctggcgaggagagtatggagaagcaacgtcgatgaagagatggctcgtatggccgaatgtctcaagcgattcccactcatcgctttcgatacagagtaccctggcattattttccgcacttatttcgattcctctagcgacgaatgttacagagccatgaaaggtaatgtcgagaacaccaagctgatccagtgtggtttcactcttttcaacgccaagggagagatcggtggtgtttgggagattaacttctccaatttcggcgacccatcagacacacgcaacgagctttccatcgaattcttgaggaggcatggtttggatttgcagaagattagagacgaaggagttgatatgttcggctacgggtttttccctaagcttatgactgtgtttcgttctcagaaacacgttgagttcgtcactttc

SEQ ID NO: 503 - DNA, 497 bp, Arabidopsis thaliana
ccacgcgtccggttattgcactaagtcttggcctttttccctttcttcgtatatgtttcaatttgttttagaaccaaacatttcatatagatagaggatttcttaattatttaataaagatgattcaaatgtatataattgttcaactagttcagttcgcttccaaaaaacagcgacgtcttctctctcacggcgataaaaacagagaaccttccatttgtttctttgagcgcgtgaccggcgcgtggcggcttagttagcgccggcgtcggtcctccagtctggttttctttagggtttcattctctacttagtctggttcgtttttagatcctgatttgatgttggcaaggtgaagaatttttggatcttagatctgtaagagccatcgttgtgggctttgattcgtcgaaggttttgtgcgatcggaactcccttttctctgttttgagaaaattatgggtttctcctttgttcttgcagatcttgtttccgac

SEQ ID NO: 504 - DNA, 497 bp, Arabidopsis thaliana
caatctcagtctctctgttgactccgactgttatataaaaccatacaaataccttcagattcactacttcaaacctcaaagcaaccactgaatctcgactttgatcaattgagagagaaatgaacaccggcggtggccaatacacggattttccggcggtggaaactcacggaggacagttcataagttacgatatcttcggtagtttattcgagatcacatctaagtatcgtcctccgattataccaattggtcgtggagcttatggaatcgtttgctctgtgttggatacggagacgaacgagctagtagcgatgaagaagatagctaatgcttttgataatcatatggatgctaagcgtacgcttcgtgagatcaagcttcttcgtcatcttgatcatgaaaacattatagctataagagatgttgttccaccaccactaagaagacagttcagtgatgtttatatctctactgaattaatggatactgatctt

SEQ ID NO: 505 - DNA, 497 bp, Arabidopsis thaliana
  misc_feature (1)...(497): n = A,T,C or G
ccacgcgtccgcaaaaaacaaaaacagagccaggaataatgtcagtcttcctctgtttcctctgcctcttaccccttatcttaatcttcttgaaaaanctcaaaccatcgaaatggaagcttcctccaggcccaaagaagcttccgatcatcgggaacttacaccaacgccgggaattacatcccaggaacagtcggaatctttccgaaaagtacggaccaatcgtgtttctccgatacggattcgtccccgtggtcgtgatctcgtcaaaagaagcagcagaggaagttctcaagacccacgatcttgagtgttgtagccgaccagagacggttgggaccagagcaatctcttacaactttaaagacatcggattcgcaccgtgcggtgaagattggagaacgatgcggaagctctcggtggtcgagctcttcagctcgaaaaagcttcaatctttcaggtatatcagagaggaagagaacgacttgtgtgtcaag

SEQ ID NO: 506 - DNA, 497 bp, Arabidopsis thaliana
cggccgcccacactcctgttgccattaaagttttaagacctgatgctgctcaaggaaaaaaacaatttcaacaagaagtaagattttatctattttctattttgttttatgcttttgcgtaaatcatacatatttttgttcttattttataggttgaggttctatgttccataaggcatcctcacatggttcttctccttggtgcatgtcctgaatatggatgtttggtttacgagttcatggaaaatgggagcttagaggatagactttttcgtactggaaactctccaccgctttcgtggaggaaacgttttgaaatagcggcggagattgctaccgcactctcattccttcatcaagctaagccagaacctttagttcaccgcgacctaaaaccagccaatatactcttagacaaaaactacgtgagcaagatcagcgacgttggtttagcgcggttagtccccgcatcgatagctgatagcgtcacgcaattc

SEQ ID NO: 507 - DNA, 497 bp, Arabidopsis thaliana
ggcatttttcctagacgacagaaatctatgggtacattacaactgaaaaagaaccaaagtctctatccccaaactaaatcaatcaaattcgtcactcaaaactatgtagagagaatttctattccagctgtatttacatggaaacctaaaatgaaaaaaaaagaggttagaaagcattgttgatgacgatggtataccagatgggtgtttatgtacggtttttctttctttctttctcagctgcagtgatcatcattcaaatgcaagagacatgaaagtgtcgtcatccaaaagagaatcaatgtcaattaaatcgtcttcttcgttgtaatttgcagcttcctctgtgttgtttttcaatgccgagctagaagaagcctcgttctcacggaagccttcaacgacagtcaatagtctacggtattgagcccgtgcctctggatattgagccatagacttcactcgggttagagccttttgaagcctttcctctgttt

SEQ ID NO: 508 - DNA, 497 bp, Arabidopsis thaliana
cacaaaagcttaaaggcttctttcatggaaggaaaaaattatccaagaagagcctatcaacgtttttctcaacgaaaacaaacataatagatacattacatcatatacatatacataccataaaaccaaactttattatgtacttaagactggttacttagttagctcgtccagacgacgatccatggccacagatactgcttcaagaaacgtagcctcgcttgacgcaggcaacaccgagttatgagcttctctcactatctcttcaatcgctgagtctttgttcaccgtttctctgcacattacgcttcctatttgatatggcgtcaggtttctctcaacgcctttcttcagcagcatcgtggagatacgtagagtgcgtgagacagcttcaggaacattccagccatggagttgcagaagcgcaatgtcttgttcggagtctagagagtttatgtagtcaatggtgtctgcagaaaacgggagtttcgcttgcg

SEQ ID NO: 509 - DNA, 497 bp, Arabidopsis thaliana
gcgtcggtactccaggaagagaaggtgatagcagtgcttctcctggcggtcggggtttgtctgaattgagaaacagaatccatcagtttttgaggcccttatctcgtcgagaaaaccaagccgggagcacggagtctcagggtgcagcaaatccctctgccacagcgtccacagaaacaaacgaagcagttgcaaatgcacaagtagagccagcaactacgacagatgaagggaatttcatatcgagtgttcttcagcagatcatgccgtttatatctcaaaacgtagcctcctcaagctcaggtgaagctgctacaggcagaggcagcaatagtagacaagcctcttcgagagaggcagaggaggaggaaggtacagagcgagggaattcaactcggagacctgaaccaccatcacctccagagtcaaaacgtcagaggagagagtgagagattgttggagcaaaagcgaagagtggagaagcacactttttgaag

SEQ ID NO: 510 - DNA, 497 bp, Arabidopsis thaliana
  misc_feature (1)...(497): n = A,T,C or G
ccacgcgtccgaactcaagaaggagtgaaatcaacacaaaacacaatgatgatccttaggctggctctagccatcgtcatctccacctatgcaaccgcacaaccagcatcaacatcgtcgcttgtaacctatatattcggcgactcgctaaccgaagttggtaacaacaatttcttgcaatattcgctagcaagagcagactttccatattatggagttgatttctccggtggnnnagctaccggaagattcaccaacggtagaactatcggcgatatcatatctacgaagctcgggattctatcgccaccaccatatctatcgttatcacaaaacgacgatgcatttctcagtggtataaattacgcatctggaggagctggaattctcaatgaaactggcatttacttcatccaaaggctaactttcaatgatcaaataaattgtttcaagaaaactaaagaagttattagggcgaaaatcggagatggagctgc

SEQ ID NO: 511 - DNA, 497 bp, Arabidopsis thaliana
  misc_feature (1)...(497): n = A,T,C or G
gcgaaaccagctgtgcctcttggtgctaactataggcttattgatattcctgtgagcaactgtttgaatagcaacatatccangatctatgttcttactcagttcaattccgcgtctttgaatcgtcatctttcacgagcttatgctagtaacatgggaggttataagaatgaaggattcgttgaagttctcgctgctcaacagagtcctgaaaaccccaactnnttccaggggacagcnnntgccgtcaggcaatacttgtggttgttcgaggagcataatgtcttggagtatctcattcttgctggggatcatttgtatagaatggactatgagaagtttattcaagcacatagggagactgatgctgatatcacagtagctgcattaccaatggacgagcaacgagccactgcttttgggctgatgaagattgatgaggaagnacgtattattgaatttgctgaaaaaccaaaaggggagcacctaaaggccat

SEQ ID NO: 512 - DNA, 496 bp, Arabidopsis thaliana
tttttttttttttttttttaggatccagcagcttgaataacattgaaactgtcccaagaaattgcaaaacatccataataaagggttcaactaaaaaagaggtacttcaagaaccagctaaacaaaaagctctattaagttttacgaatccgagcaaaccacaaacaaaagaagctagcctcttaattcatcctttgggcagcctcctttgcaataactctttcctttgccttggtctttgcctgagacttagatcccattatgcctcctccccatttcttcctgtactcctcgtacttgtcattgaagttggccttgatagcttccaggattttgctgaactctagcttgtcctcgttcttgacagtggtcaaacacaagcaagaagcagtcttctggtgaacaaccgctccaagacgagatttgcccttgacaatgcagtacgggacttccatcttcctgcacagagcaggcaaccagacaaccaactcaattg

SEQ ID NO: 513 - DNA, 496 bp, Arabidopsis thaliana
aaacccagtatacatagaccaaaaaaaaaacaatcgtacattactacattatctcgcaatctcattcagaccggaaccataactcttggtccaggacaattgacatagcatagactcagtttctccttctattagtgctgtatcgatgcttacgagactccccttcttcttcttcggaagacaactcatgcttcttctttctacttctacggtttgattccgaatcagattcagttttctttgtgcttctgtatctgtcagaaaactcttcaggatcatcagatgcttcatacacatgcttttctttgcccttcacactcctgtgatgcttctcagaatcacgatcatcatatctcggtttcttctcggatctattacgattttcagactccatatcgacgtatctgtgtcttctctcatcatatctatgctctttctcgactctctgaatctttccagactccgaataatgctgtttctgacttttctctgaaac

SEQ ID NO: 514 - DNA, 496 bp, Arabidopsis thaliana
  misc_feature (1)...(496): n = A,T,C or G
ctttttttttttttttttttttttttttgggaatagttttcaatttttaaatatcgttacaagttgtaatggaaagatattggacaatggtgcagtgtcataaggacaaagagctttacaggctaatggaaataccagattctgtgttttgcagttggagtgtatttgtactccatatggttccataagctgggagaaggcttcacatggacttatctcaactctctttcttgcaagtaagaaagcttgcttatttccaaaggtaggctggtacgtggaaacaaaccaaagacaacctaagagcatattcatataactacccttgcttgattcataaatcataggtctttgcataatcaatgcactagaaatcaaccagtcctcgcgcacatatgtatacatatattnnngtgttttggtttccagatgcacctaaaaaaatacttatatgcaaaagaatagatttgcctttgttatcccaaagtcctccttcaag

SEQ ID NO: 515 - DNA, 496 bp, Arabidopsis thaliana
  misc_feature (1)...(496): n = A,T,C or G
ctggagcaaatatcatcataacagcatcttaccaggcgacaatacaaggattcgtggnnnnaggtctatcggtgggagaagcagaaaatttacttagaaggagcgttgaaatcacgtacgaggcacgtgagattttctacaacagatggaccaagggttcatgggatttcgcctatgctggaaaagcttcccggagaccgattcttgtcgcagcttccgttggtagctatggagcttatctcgctgacggctccgaatacagtgggatatatggagattctgtgagtaaggagacattaaaggatttccatagaagaagagttcaaatcttagcaaaatctggagccgacctaatcgcattcgagactattccaaataagctcgaagcagaggcttatgcggatcttcttgaggaggaagatatcgatattccggcatggttctcgttcacttccaaggacggagtcagtgtgccacgaggagattcagttgtaga

SEQ ID NO: 516 - DNA, 496 bp, Arabidopsis thaliana
  misc_feature (1)...(496): n = A,T,C or G
cgaagagatttaacagtccaataagctattctatcaagaaacgtcgttggaacatgatgcttcttcagatctatcgttatatcagctttatatgtctcccatggcctgaaacagttccacttccattcagaaccatcttctttagtaatcttattaggttcaacaccccaatagctcgcgattcctttatctcccttgttattacctccggcggcgtctccaccggtggattcgttctctgttttcttctgattcgcgtcctcctccttcatcggagttttctctcccagagtgatcgtgctagcgaatctcatacctccaatcgtcggagctctagtccatatccnngcagatgtaacaccaggcttcaaaatatggcttgctgataaagcctcgtgagacgaaaccgtacggaccgtcgagaacaaacgtggtnnnnccgccactaacagcgatttcgccgccttggctccaccgcgagttatcatcattgttt

SEQ ID NO: 517 - DNA, 496 bp, Arabidopsis thaliana
acatgtccaaccataaggaatttaaaaacataagggatttgaaatcaataaaatgaagatgggttctctatgccttgcaaaacaccaaaatgagtatgaggaaaatcaaaggagcaacgattattctcctcatctctcctcgattggttcattgccatgaaagatgcaaagaaacccgccgattcttcgaaacccttaaaagtcttattcccttccgcgcgtgacatctcctctacctcctctttgttactctctccgacgaccgatttcttaaggaaccgcttaaaccatttgaccgaatcttttggataacgtttgagaccattgacaaaatcaacatagtatagaccaaatcttgcagtgtatccatgctcccattcaaaattgtccatcaatgaccatgcgtaatatcctcttacgtcacacccatcttccactatagctttgtgaagttcttcgaaatgtgtcttatggtattcaatcctaaatgtgtcct

SEQ ID NO: 518 - DNA, 496 bp, Arabidopsis thaliana
aaaaaagaaacgaaacaataaaaggatgcgaagtatcataagttaacaacataagaagagacttttcttctacagacgcttctactcgtcaccgaaggtagtcttcttaccttggggagtaaaactaggtcttccacgaccacgatcacttcccctgccaccaccactaccaaaacgaccacgacctccatctcttcctctgccaccaccactaccaaaacgaccacgacctccatctcttcctctgccaccaccactaccgaaacgaccattgccccttccaaatccaccaccaccactgctatctcctctcggtctaggctcatcgactacaagatagaatcctcctcccatatcacttccatttagttccaacgccttctctttgccttctgaaaactcaaggtaagcaattcctttggagttaccagtgtcacggtcaattggaacagatacatttttgatctctccacatgaactgaaatgttccctcaaa

SEQ ID NO: 519 - DNA, 496 bp, Arabidopsis thaliana
  misc_feature (1)...(496): n = A,T,C or G
ccacgcgtccgtccaatacctcgacactcctattactcctccagcgcacactcaaagctagtggtgcagctgggatggctccgcagcgccgccgttcatcttctgccactctatttggaaggatgagtcagagcttccgcggggcacccccaggtgtaaatcttgccatgataaacggtgctgcgggaggtggagcagatacctttagacaagttgaagcaaaatatccggctctactgtttaagcagcagctcacagcttatgttgaaaagatatacggaatgattcgcgataacttgaagaaggagatttctccactccttggattgtgcattcaggcaccaagaacatcgagggctagtttagtgaaaggagcatctcgttccgttggcaacactgcagctcagcnggcactgatcgcccattggcaaggaattgtcaagagtcttacaaatttcctcaatactctaaaatcaaacaatgttccttcattttt

SEQ ID NO: 520 - DNA, 496 bp, Arabidopsis thaliana
ttgaaaccggatcagatggttttgtactttggtccagagtttttggaatcggttaaagcgaaatggatacaactcagtacgagacacataacgaccaattcgagagaagaaaataaaaaagacagttacatgagagacctgaacattcgaacaactaactacttaagaagacacttacacatgtttagagataaagtatcacatgttcttcattcagacacgcgattccattttcttgacagcattttcgatggctggcatgtttttcttgaaggttgaccattgttcatctgttaagcttattcctttagaagtaggaagttctttgccatctttcttgtaatactctctgatagaaaccaaactcttccctttaaattcctgaatcgtcactcttctcttatccgataacctgcaaatgataagatcgccgtcatcatcaaactctttgtttcctttaccacaatccttatctccatcttcttcttccttattc

SEQ ID NO: 521 - DNA, 496 bp, Arabidopsis thaliana
  misc_feature (1)...(496): n = A,T,C or G
gtgactctgtatactgatgaagatgaatggtctagctggaacaagatcggtgatcctgtccttcacatcgagcttagacgttgggctgatgttttagtcattgctcctttgtctgctaacaccttaggcaagattgctggtgggctttgtgataatcttctgacttgcattatacgagcttgggactataccaaaccactgtttgttgctccagctatgaatactttgatgtggaacaatcctttcactgaaaggcatcttttgtctcttgatgaactgggaatcacacttattcctcctatcaagaagagacttgcctgtggagactacggtaatggagctatggctgagccctctcttatctattccactgtcagactcttctgggagtctcaggctcatcagcaaaccggtggaactagttaaaaccatgatttccannncatgcattttgtggaaaatcatctgttttcactatcttagataatagtagatt

SEQ ID NO: 522 - DNA, 496 bp, Arabidopsis thaliana
cttttttttttttttttagataaaagggcttttggtaaattgatgatcaaatatacgattacagaccaaacttaattgagaaaatttaccgaaattgaaagagagagatagacatgcagaaggtgggttgttgaatcagtagcggcagatcttggccgtaggcattgtgacacaaacttgtgcgtatttcttcttggccgcctctgtccctcgcttgggctcttcttcttcagccatggctaccttagccaaagaacaaaccgctgcagctgcagccgtgaacatgaggtccctcctcattgtggtgctgctctgttccttgacttctaagctgggtgtgttgtcgctcgtggaggctctgactacggagagccttcgtccgccggtggctgagggaaccttggcgacggccgggaagaaggtagcggtcatggtcatcgatgccattgcttgatagttgattctactcgctagttggctctcggcggacgcgtgg

SEQ ID NO: 523 - DNA, 496 bp, Arabidopsis thaliana
ttttttcataccaaacagttttattctttgttccgcaatttgctacacaatacaaagtcaaagctctccccctaagtaaaaaacatgaagacggattaatgttaaagaaggaaatacatacacagcaaaaagcctgtctgtatgtacatcgtcaaacctacagacaaaacccggaaatgtgtatctgaggatttggtgattggttgggaaaactcaagtgggtgaatctcctagtagcaatgtatgccaccatccacacgccacttttctcagtctgcagccatccagctggacttgtgtaggaatgttccggtcattcgtgtcccctagacccagctgtccatatttgttccatccccagcatagcaactgaccatcttctgccaaaaccgcactatgtcgcgcgccgcaactaactgcttttgcatgtttgccctccaaattctggccatccagcaacctcggtaatatctcagcatgatcagtaccagttccc

SEQ ID NO: 524 - DNA, 496 bp, Arabidopsis thaliana
ttttttttttttttttttttgattgatgagttatatcaacattgatatatatcatgaatggtgagtgatccaaaacaagaaatgaatacaatacaagaagatctggaatttgttcagactacaattcaatacaactacagtttcatgtctcctgaatcagttatgttccatgagttggtccaatgttagagattgatgactcagtctcctccactcttaaacacccattagcgatcagaatcacagagacagagaacaaaagaatctgcgaatatgtaaagagagaacaacgtgcttttacatttctatctacctttgtgatcaaatcagtcttcgtgctcatcttcgccttcagaatctgatctgacatcttcactaagcttgcctctatcttgtatttgtttcacaagcatccgatacatcaaaacccaccaataaatgtgaagaacaagcaagcaatataggagagtgttaaacatgtagtagtaaattggtc

SEQ ID NO: 525 - DNA, 496 bp, Arabidopsis thaliana
ccacgcgtccgtcgagtctcgatctcctctctcaatctcagtcttcagcttccaattgactttcaacatggcagatgatgaagttgttgatccaaagaagtaccttgaggaatcttgcaaaccaaaatgtgtgaagccacttctcgaatatcaggcatgtgtcaagagaatccaaggtgatgattctggccacaagcattgcactggccagtattttgactactggcaatgcattgacaaatgtgttgcaccaaagctgtttgcgaaactaaaatgaaaagaggtgaagctggagactctattgtcttgagtttgctacatgtggtttaaaattgatgtataaaatgcagtggatgttgaacttttttttactgcaaaccagattgccaaatggctctgcttcttggttttgtttccatcgcaagtttgcgcttactacatttttttgctacttgagtaattgcatggcctaataacaagatatgttgtgcctaaa

SEQ ID NO: 526 - DNA, 496 bp, Arabidopsis thaliana
ttttttttttttttttttttttttttttaagcacagaattcctcttcattccaatattagaaacaatgcaacagatacactagtcattccaaagagagtaataattctcagtaacttgacacttgatcaatttttgagtttgtggaggaaccaaaaaagcctaacactaaaaatcatttatatataagggcatcacgaccgggcccaataccaatgtaatgaatgggcacacccacgagttcttcaatcctctcaacatattgctgagcagcctttggaagatcagagtagtttctgaccgaggatatgtcagacttccacccaggtaagacttcatactccacatgcagttcttcgagaagacgaagatcaccagggaatgatttaacaggggtgccgtcactcctcttgtaagccacacccagctggatttcgttcagatccgaaagtacatcaagcttagtgagattaagtgatgcaaatccattgatttggc

SEQ ID NO: 527 - DNA, 496 bp, Arabidopsis thaliana
  misc_feature (1)...(496): n = A,T,C or G
cgtatggctcgatcgaaccgaacaacaagctacgtaaccttctcaacaaaatcaaacagagaaaaattatatttacgaattcggacaagaatcatgcggtgaaggtcctcaagaaacttggtttagaagattgtttcgaagagatgatttgttttgagacaatgaacccaaatttattcgggtcaacaacccgacccgatgaatacccggttgttctcaagccttcgttgaccgcaatggatatttgcattcgtgtagccaacgttgatcctcgccgaacagtatttttggatgataatatccacaatattaccgcgggtaaatctgtcgggcttcgcacaatcctggtgggaagagcagaaaagacgaaagatgcggattatgcggtggagacggttactgagatagctacggcggtgccagagatttgggntacggcgacggcgacaggcggatttgacgttggtggtgagaggatcagacggagcaagagtga

SEQ ID NO: 528 - DNA, 496 bp, Arabidopsis thaliana
gagaaaacacttggtttaagtaaagagtataacaattacagacaattaacgaagaatcatatgcataatttcttcatgtggtattgaattatataaacaccaataaatatctaggctaatacactttttcctttacgacattagaaattacaaatcttttttctttctttcttaaaactctcattaaaaacaatgataaatcaaacatgcttcgttccagcttggttactgttcttgcccatctcaagcgcattcccatactcaccatcctccacaaaccttgaccaataccagtgtgacctccacacttgacccatctcctctatcggaatccctttcgtctccggcaagaaaatgtatacaaagatcgacatcaccaccacgaaaaaggcgaaaacaaggaataacccaaacttcaaatgacaaagcatcgtcaagaagatttgcgcgataatgaacgtgaagatcatgttcacggacacggtgatactctgcg

SEQ ID NO: 529 - DNA, 496 bp, Arabidopsis thaliana
ttagaagaaagtcgttcgtatctaatgaaacattcttaccaatctctgagctgcaataataaataagatgaaatacaaactgtaagatatcaattgtagttttgagcgtaaatttccaatgggagggaacagtcttcttggtcttgtttttttttcttttgtttcttcatcggccaaaaaatatataatgtcacaatgataagggaaatcccccacaacacaatcttctgtcacttggctttatcagagctttgtatctctcttttcatctgtgtttcatcatcatcgtctcgtggaagctgcgaggaggagatccggtggaagacggtggtggagctctgttgaatctctcagggctacggctcctttctcgctctcttccccatccattgctgcttctgtcacgggaagcaaagctacctctgccaccataaccagagtcgccaccacgaccacggccgccggaaggaggtccccaacgactgaatttgttcat

SEQ ID NO: 530 - DNA, 496 bp, Arabidopsis thaliana
agtctaggtattattttatatgatcagcacaacattacaccattctttgtaagccttaaattcaaacatataggcaactaaacttcatagatcaaatatcataattggcactcaaattcaaagttagagcttcaccacaatgggacttctcacacgatgcttcttgtctgaccaaaccaattctccaaacacatagcccttagccacatttcccttacttttcacaaggatcactttaaacgtcttttgctctccaactttggtgaaattcaagctcgttggcttcaccgcgacataaacaccctgtgggttattcaccttgacggtatacatcgaaggtcgtccaacgtttttggcagtccttgaaacggtgactttgcttgatgttaagtttggaactgtgatggaaggatagttgaggttaacaagactggttttagggcttgaacaagtaaagttgttgcccgagaagacagagatttgtgatgcattgtat

SEQ ID NO: 531 - DNA, 496 bp, Arabidopsis thaliana
ttttttttttttttttgaccaaaacaaagccgagtatttaatttaacttggactaacaggttttatttgaaatttgtctttatttggaaccttttatgggataatctcccaattattcacataaatctcagcatataaaatcatcactcaaccgccgtaccgtctctcgcggcagagaatgtgatcggaaattttggttgtttattaggaaaaaacaaaccaaaattcttctcgatctcaggactcttttgattctcatcaaacatagcgaacaaatacgtttccactcctcttccaggtctcttcggtgttcctctgttctctctcacacgcgacgcaagattcgtgtaaaaagctcgcgcgttatcgaaactcgcggcgtttccaccgttagaaggccatccgctctcggaaacaaccactgggagagatccaccgcctgagcgttcaacggcagagtaaacaacgtcaagtaaagcgtcaaagaggttttggt

SEQ ID NO: 532 - DNA, 496 bp, Arabidopsis thaliana
  misc_feature (1)...(496): n = A,T,C or G
atagtaactaaatttttaaaaatcttacaaaaaaaaatacaatccaaaccatatagtaatctttctatttcatacacacaatatactaaaaatacaaagacaaaatgaaatcttcaaagcaaataacaaaaccagaggttttttttcttcttctaaatctggtttcaaggaatgtccttaagctcaaattcagagctctctttcttcgtcacttccttctccactgaatcatcatcagtcacaacaacagtaatcacatcagctttatactgatgtttcatggcaaacacaataaaaatcaagaagttcaatgctcccaagacaacaagtaaccagtagaagtagttcaatctcgctttgttaaggttacttctaagccagcttttgnntgnnnccctatcaacaagcgaaacaagcaagctactcacgaagaatcccatcgatatcgtgcttagaaacaatccggtgctcatcgatttcatcctctctggtgctt

SEQ ID NO: 533 - DNA, 496 bp, Arabidopsis thaliana
ctcgtcaatcagaacattatttggtttcagagtttcgaaacatctgagttttttccatgagacaaaaacatggatccaagggtagtaatttaaacaaaacaatgaaaggtgaaacaaaagcctcatatagatcactaaggagtttcaattctgaaagagatgcaactggattctttaggctgaaacaacggcttgttgttttgcttccttctcttgcaagctctcatagtatttgacaagaacattccatccactcggacacataaatccatctggaggattctcccctgttcttgcataagttcgcatctttgttccagaaatgaaaagaaactcttttgcacgagaaggatcgaaaaacgccatcttcttctcgattgtatcgtaagctgcaaccctaaatggaagaatattgagtttctcaagtccaggggccatgcttaagactctctttccatgatcaggatcatatagatctctcttctcagtagggtgg

SEQ ID NO: 534 - DNA, 496 bp, Arabidopsis thaliana
cggccgcggcttgtcatgctaggatatcagctcctgctgcacagttaggcttgcctgagctgcaacttggtgttattcctggttttggaggaacgcagcgtctcccgcgtcttgttggtctcaccaaagcccttgaaatgattttgacatctaagccagttaaagctgaggaaggtcattctttgggtcttattgatgctgtggtgccacctgcggagttagtaaccactgctcgtcgctgggcccttgacatagtcgggaggagaaaaccatgggtatctagtgtttccaagactgataagttacctcctcttggagaggcaagggagatactgacgtttgccaaggcacagacactcaagcgtgcccccaatatgaaacaccctttaatgtgccttgacgctattgaagtaggtattgtttctggtccaagggctggtttagaaaaggaagctgaagtcgcctcacaagtggtaaaactggataccaccaaagg

SEQ ID NO: 535 - DNA, 496 bp, Arabidopsis thaliana
  misc_feature (1)...(496): n = A,T,C or G
aacagagcatgaatcttctacccataaatatatacaagccacacgaatccgccattcaaatgttttaaaagttcagttgtggccttgtccattattatcttcaggaatatatggttccaaaagctnggcacatgggttaggatcttgatgcataatccttgcagctctttcgaactcctccctcaacactctgatactaaacttgtcgaccaccctacccagatcatggctcgtctcaaacggatcctctatgcatatcaagtgcctatcgttccccacccttctcgtccagtccttctctcgcttcccaagtatggaaccggtgcggacggatacaacattatacgcatagtcatgagcgtaagcccagtagttgaagaatccccagaccagctcagctatggtctccctgttgtnngatccgaagttacggagtctatcaacattatcaaagtatgtgcaccggatattatctacccgaactgagtaagtcggc

SEQ ID NO: 536 - DNA, 496 bp, Arabidopsis thaliana
  misc_feature (1)...(496): n = A,T,C or G
tggcgtctcttggccaaatcaccctgccacgcgcgccgtcgtcggagattggcctcttacgccgtcgatttgagcggccgatcatcagaacccggatcggattcaacggccggattgcgagcgtattgactaacgcaggggaccaagcggtgtcggtaaaagcgagtgtgagccagaaggtgattgaagaggaagccaaagttattgtgggtacctacgcgcgggctccagtggttctctcgagtgggaaaggttgtaaattgttcgaccctgaaggaaaagagtatctggattgtgcatctggaatcgctgtgaatgctcttggtcatggagatcctgattggcttcgagctgtcactgagcaagctggtgttcttgcccatgtcagcaatgtttattacacgatccctcagatagagctcgcaaaacgcnnggtggcgagttcttttgcagaccgtgtattcttttgtaactcgggaacggaagccaatgaagc

SEQ ID NO: 537 - DNA, 495 bp, Arabidopsis thaliana
  misc_feature (1)...(495): n = A,T,C or G
ttttttttttttcacaaagctaattttattatcagcacaaaccatatcagacacataaacccgagtgaattacgggacgacaaagccggcaggatataatcctccggtacacaagccggcgaggaatgaaaccccggacactaagccccgacatggggaaacgacgtagaaagacaaaataaaacatgattgatgattttacacataaacatagttctctctttaaccaaataaaccaagancgaaaattaatcggagatttcgtcggagattgagacacccactttaagaaaatttgatcttcttgnctcacttgataattaaaagtcttcagaagaaaaaccttgggatactttggatggcagacggtggaaactcagctaaacatgcagagaccgtcgagaacgccgtggccggagatatcgactatgcgacttgaaccggtagaaagaacccaaaatctgggcggatttcgccctagatccgtattgttga

SEQ ID NO: 538 - DNA, 495 bp, Arabidopsis thaliana
tcagcggccgcccgggcaggtacgagcttccactatcgaaaactacgttaatgcctttgacacctgtggtcttgtcgttaaagagaagctctgctggtccagccatgtagtttttactaggtgaattagtagccaatgaagtccatgtaactccagaagaaggaacaagctcatctccaatagagagaaagcctttaccagtatgacttaagcaatgcacaatcacattcttcgttatccccaaggactttagctgagttgagaggcctactttccctcttccaaggccaagtattcccgctgttggaggaggaggatgtggaccaggattctgctgatcatacccacatccaaatgtcaaacgaagattcataatggagccatttgcgagttttagaggaacctcatcagttacaagtgcaccaatagatgatgcatgatcggagtatccgatttcatagtcacattgatcctcagggtcagcacaaggtctgt

SEQ ID NO: 539 - DNA, 495 bp, Arabidopsis thaliana
  misc_feature (1)...(495): n = A,T,C or G
atcctcacaaatttgcattgagattacaataaaacgagtggtgttgctctgttctgttcttcccacttctactccaaaaaatcctaacttttcgcattannnnnngttttgcgtttcgattttttgtctgaaaatcccaattcgacactctgtttctgcccacaaaactatcttccatgaaaaatcgaaactttgtctacaaataatgactccgttatcctctgaactcgttggtttcactatccctttctactccaaaactcagaaaccctattcaaattcttctcacggactcctactatctcacaatcgaagctccctcttaaccttctcaaactctaaccctaacaacgacaatggtagatccttttcatcttcaggagcaagaaaccttcaaaccactaccacaacagacgcaacactccccacagaacgaagacaacaacattcacaatctctcggatttagagatacacagatgctcaaaatcttcca

SEQ ID NO: 540 - DNA, 495 bp, Arabidopsis thaliana
cgggcaggtccacaccacatctctctctctgtctatctatctctctcgctcgctcgcataaaaggttaactcaaaacaagtagctcctccttccattaggatggcggcaggactctcaaccgccgttacattcaaaccactccaccgctctttctcctcctcctcctcctcctctaccgatttccgactccgcctcccgaaatccttatccggattctctccgtctcttcgatttaaacgcttttctgtctgttacgtcgtcgaagaacggagacagaattctccgattgagaacgatgagagaccggagagcacgagctccacaaacgctatagacgctgagtatctggcgttgcgtttggcggagaaattggagaggaagaaatcggagaggtccacttatctaatcgctgctatgttgtcgagctttggtatcacttctatggctgttatggctgtttactacagattctcttggcaaatggagggaggtga

SEQ ID NO: 541 - DNA, 495 bp, Arabidopsis thaliana
  misc_feature (1)...(495): n = A,T,C or G
aaacattctactatgatttcatcgatctgtcggaaaacgagatcacaggtnntccagcaaggttcttgaaccaaacagagtatctagtggagttcaaggcagcgggtaacaaactacgattcgatatggggaagctaacgtttgcaaagacgctgacaactttagatatatcaaggaacttggtatttgggaaggtgccggcaatggtggctggactaaagacattgaacgtgagtcacaaccatctttgtggaaagcttccagtaacaaagttcccggccagtgcgtttgtgggtaatgactgtctttgcggctctcctctttctccttgtaaagcttaagcggcaagaaagctacaactggtagttggatatttaccgtgaccaataaagtttagctccaaataaaatttgtattaaaaagattacaacaaataaagtagttttatgttatgaagaagcttcattctaacaatatgtattagtgaaaaaaaaa

SEQ ID NO: 542 - DNA, 495 bp, Arabidopsis thaliana
ccgccggctttgctgtgtgtgtgatcgttcgtttactaaatctgaaacaagtatctaacgccttgccggagatgtcgagctcaggccaaactcagttccgttatacacagacgccgtcgaaggtggttcatctgcggaatcttccatgggaatgcgtcgaagaggagctcatcgacctttgcaaacgattcggcaagatcgtcaataccaagagcaatgtcggcgccaatcgcaatcaagctttcgtcgaatttgctgacttgaatcaagctatatcaatggtttcgtattatgcttcatcttcagagcccgcacagattcgtgggaaaactgtctatattcagtactctaatcgccatgagattgttaacaatcagagtcctggagatgtccctggaaatgtcctcttggttacctttgaaggagtggaatctcacgaagtcagcatcgatgttatccatctggtattttctgcttttggatttgtgcataaaa

SEQ ID NO: 543 - DNA, 495 bp, Arabidopsis thaliana
  misc_feature (1)...(495): n = A,T,C or G
ccacgcgtccgaaaagccatgaaaccgattcaatctccttctggagtagcttcacctatgaagaaccgtttacgcaaacgtcctgacctaagcttaccactcccacaccgcgacgtcgctctcgccgtacctctccctctcccacctccttcttcctcttcatccgctccggcgtcttcctccgcgatctcaaccaacatctccgccgctaaaagcttatccgagctagaacgagtgaaccgaatcggaagcggagccggaggaacggtttacaaagtaatccacactccgacgtcacgtcctttcgctctcaaagtgatttacggaaaccacgaagataccgtgagacgtcagatctgtagagagatcgagatcttaagnagtgttgatcatccaaacgttgtgaaatgtcacgatatgtttgatcataacggtgagatccnngttttgcttgagtttatggatcaaggatctcttgaaggagctcatatatgg

SEQ ID NO: 544 - DNA, 495 bp, Arabidopsis thaliana
cactctgttgcgtcagtatcactggatcaccttgtggcacaaaagcgtggctctgccatcgataagccaaaacaagggactacaggaactgatatagatagtatccgcactgcaattttggaagaggctgcgattgtgttcgctacccttagcttcagtggctctgcacttcttgctaaatctaaccgtggtttcgatgtcgttataatagatgaagctgcgcaagctgttgagccagcaactcttatccctttggccactaggtgcaaacaagtatttctggtaggggatccaaagcaactcccagctactgtaatctcaactgttgctcaggattctgggtacggtacaagcatgttcgagagacttcaaaaggctggctatccagtaaaaatgttgaagacccaataccggatgcatccagagataagaagctttccgtcaaagcaattctatgaaggggcactagaagatggatctgacattgaagctcag

SEQ ID NO: 545 - DNA, 495 bp, Arabidopsis thaliana
ctgtccatcactcggaacggtcaggtcactcacgcgtcctcccttccgtctccattcactgccactggcctcgagagagcgtgcgttccacgcacctagttcctttggttcgtcaggctcgaccaccgaccagacatcctcttccatgagctccagctcaaaggtagtttctccgtccacatgatggtcatcggactgctgatggctcccaagaaacctctcgcttcgactaatcgctgaaggtggggtctatatatatctccgcatgggaaagcacacaagatatgtcgcagttcagctgttcgacacgtgttcactcattgcaagcaggtccaactaattttgtctattaacgttgacacgtggtctaatctgaacccatcaataggcagattgagaccggactcgacgagggtgttgttggattggagagtgaatggctaacgatggagaccgacgaactaaactagcaaagtctacatgtggtccatgatt

SEQ ID NO: 546 - DNA, 495 bp, Arabidopsis thaliana
  misc_feature (1)...(495): n = A,T,C or G
attttgtaacaataatacaattatacattaaaactctccgacgatgcctcaggcaccgatgccagagttctctagctcggtgaagctcaagtacgtgaaacttggttaccaatatttggttaaccatttcttgagttttcttttgatcccgatcatggctattgtcgccgttgagcttcttcggatgggtcctgaagagatccttaatgtttggaattcactccagtttgacctagttcaggttctatgttcttccttctttgtcatcttcatctccactgtttacttcatgtccaagccacgcaccatctacctcgttgactattcttgttacaagccacctgtcacgtgtcgtgtccccttcgcaactttcatggaacactctcgtttgatcctcaaggacaagcctaagagcgtcgagttccaaatgagaatnnttgaacgttctggcctcggtgaggagacttgtctccctccggctattcattatattcc

SEQ ID NO: 547 - DNA, 495 bp, Arabidopsis thaliana
aacgatgaaagctgtgagctttatgtatgttcgtccacctggctatgatcctgaaagtgccaaagcagcagaatacaaggatgagaaacacaagggtcagggttcttcaactcaggatccagtggcggacgacaatgttggttctagaccagaagaatcacaaggtgggggagaacgcacacaggaaaggaagaaaccacgacccaaagatgtgtttggtcgtgctcttcctactgaagaagaatttgaggttcttaaaaatgcaccaaggatggagactggtattcctgggagagtaaagccatttgcagttgaagtgcgtaatgtgaaatgtctgagatgtggaaactttgggcaccaaagcggtgatcgtgactgcccattaaaggatgcagtaatgccaaatgaagaacttcgattgaaaagagatgacccgttgactgctatcattgcacatacagatcctagtgagcctctgaagtgggaattaaaaca

SEQ ID NO: 548 - DNA, 495 bp, Arabidopsis thaliana
ctttttttttttttttttttttttttttttacatagttacatggatttattcaaagcatgtgttcgcaatacaaagtttgcagattccgagttacacactgagacgattcttttcattgttctcttaccaagaacgttttaacagagaaaccttagcttctttttctactcgataagtttcgatccatccttgaatcaaccgtatctcggcttcccgctggtccacaagccatttcgggtcttctggtgttgaaggtcgtagatccaagtgatgtgcaccttcttttgtgacgagagcaacaatggtatcagataagttcttgagaacactgccaccactccaaggatctaacagaccatttgagaaaatgatgttacttccaaatgacttcaaggtggtcgctatatcatgtccaccgaactctgttgtgacccatttgggtcttggattaactcggaatgtattccagcattcctctttgtatgaagagtaat

SEQ ID NO: 549 - DNA, 495 bp, Arabidopsis thaliana
  misc_feature (1)...(495): n = A,T,C or G
taaagtttcgagctttaaaatacgaacttgttttttaaattcgtcttctccattcctgtgactatggcggctactctttggagattatactccaaatctatatgtaattctcttcaaggaatcatcttgaacaaaccctttatccagaaacagcttcttctttcttcgagaactcgaagtttatctttttcctcagattctcagtttggctctgcgacnnngaggtttgttcaaatacagggttaaagaccggtggtggtattattgttaaggaaggatttcttagatgggaaaatggaggagggacatgtcatagctcggctcaaatttattcctcggctttggttgagtttggtgcagtggttcatgaaaaagcggtcttaggtgcagaggttcatgtaggatctggtactgtgattggaccatcagttgacattggtccttccacaagaatcggatataatgtttcaatcagcaactgtagtattggtgatt

SEQ ID NO: 550 - DNA, 495 bp, Arabidopsis thaliana
tcgatttgttccgtgttccaattgtagtggcagcaagaaactgtttgatgaggatgaagatagggtcaagagatgtcctgaatgcaatgagaatggattgatacgttgtcctgattgctcttcttgagatatatcatcaatgaacctgaaaaaaccattaaaaaaaagaagaaaaaagaggtatttatttctcttttgatgtttccattgttgtgtagaacagtgaatgatgctgccacaagtatccgaaaatctcttttggatcagcagcatttcactttgggttttttaaggtttgcgatcaacggtaatgggaatgccggtgatcgtggatttagtttatgtatgtgtttgctactaagggctaaatgtaattgtgtaatcaaaatgtctgaaacgggtagtaagcattttgactcttgtgtgtcaatgttgtgaaagacaactgtgttcttatgctatatatttgattgtaaatatttcgtgtgtttatgg

SEQ ID NO: 551 - DNA, 495 bp, Arabidopsis thaliana
  misc_feature (1)...(495): n = A,T,C or G
ttttttttttttttttttaaggaaatagtactcttattaataccatagtcaccgagcttaatttgactctatcaataccataatcaccaaaagcttgatatgcataaatatatgtgtgcgctttatatatgtttcatagttcatttgtgcgtggaagagctggatcataaggaaaagaagcacagagcgtgtcgctctcattctcctaaaatcttccaaggttggagttttaatgatgtggaaggaggagaggctggaagcngtggctgagacaggcttcccatacttggtccaaatccgagagaagaagggatgtgccacactcatgcatttcccatccttctaaggcgtgcaatatgccggccactctagttgcactcatcgcctttctcggtaaccagttctcacaggagtggacattcaccagagattttggaactatcaatgctggtgtggtatgatagatacaatctctacgtaactgcttgaggggga

SEQ ID NO: 552 - DNA, 495 bp, Arabidopsis thaliana
  misc_feature (1)...(495): n = A,T,C or G
tctagagcggccgccctttttttttttttttttttttgaacaagaaatgagtatatataaatgccttcaagtataagnnnaatcaggtgaagaaaatccaaatttttaccaagtccacaaatcttctctcaactataacaaaccaccaagtcatgtaagccaggtgcatgaaaatacagaaagattcaaattgtgtgatatggttcattttgttacagcgaccaaacagaaggcatattggtccatccataagacccgacgcctcgtggtgcttgacctgatgatgacccaacagtcacgtaactgttcccaatgtcgtcaccaccaagaagtgcaagcgcatcactcatgctgcttgtgtcactaacaatgccataacagccttggtcaagccagctcgacgcaagtaaaacatcaggccgtgttatatcaactctctttggttcccaaacctgatccaactcttctgtctttacaacattccctgcaaaagct

SEQ ID NO: 553 - DNA, 495 bp, Arabidopsis thaliana
ctttttttttttttttttaattggattagtttaaaaattgtctaatcagagtttaagcacaaaaactagaaactaaaaaagaatcaaaaacattcccaacaaatatcaacccttagattcagaacatcggtgaatccgacggtgaaggatctacaaagttaaaaatgctgtccaagtagttcttgttgtcctcatagtagttgcagtcaccaccactactctcgccggccgtctcgtttttatcgccggagaaactccggtcgattgaatcaccaccgagcaagagacccgtgaacccttcttcgattccttctcccatctgcgtagtttcaaactcgtgcatcgttgaattgatccaatcgtgttcaggttctttcatcagagtcacaccagttgatgatccgacaaactctatcttcgccgggattgattccttcatctcagagaatgacactgtagatgtcggagattcaagctgttgttgatcttcgtgtg

SEQ ID NO: 554 - DNA, 495 bp, Arabidopsis thaliana
tcgagcggccgcccgggcaggtacctgagacaagatcattaactaaatcatctaccaacgtagagactatctctccctcaatgtcaatgccttcttcatacgtctctctctcgaaatcaagccatctcccttcgaaactgctcatctctttgtcaacaagctcgtccatcatcatctctctcatcttcttcaacccatgaatctctctgttcagttcttctgctaaccaatctctttgctcaaacaaaaacccgcctttccccaatagccctctgcagctacccataaacatctgctcgcatctgagcgctaagcacttattcacaaaatcaaacagtgtctttctcttgattttggctgctgttacttctcctcggccttccatttcatcaaagaggctcgcaggtaatacgtcagtggccatccccaaagcatattctttcaccatcagttggtcagacccgaggatctcggatatgtacctcggccgcgacc

SEQ ID NO: 555 - DNA, 495 bp, Arabidopsis thaliana
ccacgcgtccgcagagacgcgaaaatggtgaacattccaaagacaaagaacacttactgtaagaacaaggaatgcaaaaagcatactttgcacaaggttacccaatacaagaagggtaaagacagtcttgctgctcaaggaaagcgtcgttatgaccgtaaacaatctggttatggtggtcagactaagcctgtcttccacaaaaaggctaagaccacgaagaagattgttttgaggcttcagtgtcaaagctgcaagcacttttcgcagcgtcctatcaagaggtgcaagcatttcgagatcggtggtgacaagaagggaaagggaacatctctgttttaagttggtttcatcttattttctgcgatttttgtacttgctggatttggaatccatttgttttagctctctcgtacaagattgtctcatctttgcttgttaactctatattttgaatcatcaagatatggttttgctgttaaaaaaaaaaaaaaa

SEQ ID NO: 556 - DNA, 495 bp, Arabidopsis thaliana
tttttttttttttttttttttagctcatttctcctatattacttattttgaatgatacatcatgaaaccaaaacactcaggaggagattagatatgcatccatatttacagcttcagaaaagagttcaacagaagatgtaaatggatggatatttcatcgttactgaaatttgaaaacgaaaacaaaagcgataaggaaagttacaagcaaagaacaaccagtgactattttatatcaagccagaccccttttcttttggggactacttgtttgctgcagcgagttccgcagtgataatgaaacttgatttcccagcttgtctcaagtactgaacatctccattcatcagcttcaccagtttccggctaaccattaagctcaatccttcttctgacacatcttcctcagtcccaaacatttggtttagtaaaaactcaggtatcccagctccggtatgcgttaacctgatctctagattagcaagatgcacagaa

SEQ ID NO: 557 - DNA, 495 bp, Arabidopsis thaliana
aatctcaagagaaatccatataaataaatagaataagattcatatcatatcaaaaaccatatcgcataactaagaaatcgtctagaaaatcacaaaaccacaaatactctaaaaagaaatagtaatatcctcatacagatatgaagattaagatagaaaacgaagaagaagagggacaaatagaaaatgagatctataagctgcttcggaacacacgagacgacgaataatgatgaatggcctataccgcaaaaacaatctctgtacgaaatcaccatcacagtaacttagatccgaagagctgagccaaaaacaagagccgcgactgctgcaactccagctgacacgaaagacgctgagatcgcactagatccagaagtaggacttggtgctggtgcctcagattgtgccgatgcaacgacggagataatcaccatcatgagaacaacaatggaagccttagagatcgccatttcaaagattttgttgtgagag

SEQ ID NO: 558 - DNA, 495 bp, Arabidopsis thaliana
tcttagaataatatattgacaaaaactcagttactcaacaacacagaacaactcgaatcaaagcaacttcataacattattttagttagatacttggttcaaagtcacaacaatacaacaacagactagtttctgtaaagcaacaggtttagttgagaagtagagaatacacaaagtcaagttaggtcaacttgaaaccaccaccaccaccaggtttgtgcagctgataagtctggcttggcacaacttgaatcacacctggttgttttgatatctcagcgacttgctcaggagtgagcttagctgaaaaaccagaagcagcttccttgtaactgtaaatcaaagcatcttttgcagcttcctcactgccgagagcagaggaaagggtacggagatgataggttttaggttcttcatcggtaggtttctcggtgtagatgatgtgaacctttgcttccgacgatcccgttgcttctccggtatattcatcagcca

SEQ ID NO: 559 - DNA, 495 bp, Arabidopsis thaliana
  misc_feature (1)...(495): n = A,T,C or G
tctagagcggccgcccttttttttttttttttaagcaacaaaacagatcgtgtttctatcgaaattgttatacaagaggttctgtatgatgaaagttatggacaagaagcatctaaaaccttatggacaatgggacgagctttacacatagcttgcaacgatgtagcttttcgcattgtggttcctttttcactttctctcatgtctagatacttttcttcaaccctctcccactcaaaacattggaccaatgatccaagagccaaagtcactagccgttgagctagccctgaaccagggcaagatcgtcgtccaatcccaaatggcatcaactttttatcctctccttttttctcaaacctctccggcttaaatttttctggctcttcccataactttggatctctatggatggnncatgcattcaccaagatgattgtgccgcgtggaacgtcatagccatcaactatacaatcttctgatgctaagtggggt

SEQ ID NO: 560 - DNA, 495 bp, Arabidopsis thaliana
  misc_feature (1)...(495): n = A,T,C or G
aacattgataaagatgctcgtgaaggtatcagtgctgatgtttgggaagatgcttcgaatggtgctcttagtgctggcagtgagaatgaagcagctgatgtaacagagaataatggtgggaactttgaagatggatcttcggaagagaagattgaacgtttagagacgaggatcgagaaacttgaagaggagcttagagaagttgctgcactcgagatttcgctctattctgttgtgccggaccattgtagctctgctcacaagcttcatacgcctgctcggcgtatttctagaatctacatccatgcctgtaagcattttactcagggaaagcgtgctacgatcgctagaaactctgtatctggtcttgttttggttgccaaatcttgtgggaatgatgtttcgaggttgannttctggttatcaaacatcatagctttgagncagataatttcgcaagcatttggtaggtctcgcatcacacaaatctctgaa

SEQ ID NO: 561 - DNA, 495 bp, Arabidopsis thaliana
  misc_feature (1)...(495): n = A,T,C or G
ttaaaatcccttcttcatcgatccttcattagatttacaacaacaacaatgccaagcgtcaagctcacacaccattctccacctgacactattgcctccgactccgtccgtctcctttcccgtgaaactctccgaatcagcgcctctctcgcttcnnctccngttgatgatctccctcctcactctcctccacctccagattctcaatttcttcattcgactctgagattgatctgttgcgaagaaatcgatggccgtcggtttaagtatgtcgctgagagcgatggttctgggagattcaagaagaattcagttcgtgctattagcttggagtctcctcagactccttttgatgaagtgggttcgtttcttagatcttacgttgtacctgaaggctttcctgggagtgttaatgagtcttatgttccttatatgacttggagagctttgaaacatttctttggtggagctatgggtgtgtttactactcaaact

SEQ ID NO: 562 - DNA, 495 bp, Arabidopsis thaliana
cggccgcttgctcaagttgttccgtggatacccgaagacgacctgctgctaaagaatgctgtcgaggctggtgcttctttggaatcgcttgctaaaggtgctgtgcagttttctagaagattttctattagagaattgcaagatcgatggcatgcactgctttatgatccagtagtttctgtagaggcggcttttcggatggctgagcttgaacgtactaaccctaattttcctactaagtttggtagaactggatattcaaaagaaaacaaaagttcatctaggaagaggaatgctgaaaggctcagaagtacttatcattccttgcggaagaaatttaggactgagccattcaattccttggatctaggtttcctcgttccaccaaatgatagccatttcatggataatggtgatgcaacacatcttggtcttgaggactctcacatggatattatccacaacgcgtttccagaaatcttggctgaaggtggt

SEQ ID NO: 563 - DNA, 495 bp, Arabidopsis thaliana
cgttattctctctttactcgttttctctttcattgaatttggcgttcacgctcgtcccgtcgttctcgtcctctcaaatgacgatctcaatagcggcggcgatgataacggagtcggagagtcctctgacttcgatgagtttggagaatccgaacctaagtccgaagaggagcttgatcccggttcatggcgatcgatcttcgagccagatgactcaacagtccaagcagcctcgccgcagtactactccggcctcaaaaagattctatcggcggcgagtgagggaaatttcaggttgatggaagaagcagtggatgagatagaggctgcttcttcagctggagatccacacgcacagtcgataatggggttcgtttacgggataggaatgatgcgagagaagagcaaaagcaagtcgtttcttcaccataatttcgcagctgctggtgggaatatgcagtcgaagatggcacttgcgttcacgtatcttcgtca

SEQ ID NO: 564 - DNA, 495 bp, Arabidopsis thaliana
  misc_feature (1)...(495): n = A,T,C or G
cggccgcaaaacaaagtcgctttattcagatctgaagaagaagaagaagaagaaacatagttgaagtctctgttaatatgtcttcaacaacaacagattctacagaattgcaaaatctgatcaaactgtttcaaaattgccaaactcatcctcgtcaacattttcctgcaaaatcttcagctgtattagtttgtctataccaagaacaaagagaagacaaaaacgagctacgcgtaatcttaaccaaacgatctactactctctcttctcatcctggggaagtagcattgcctggaggaaaaagagaccaagaagataaagatgatatagctactgcgttgagagaagctcgtgaagaaatcggtttagatccttctcttgttacaatcatttctgttcttgaaccatttgttaacaagnngggaatgtcggtagcaccagttatcggttttctacacgataagaaagcgtttaaacagttaccaaatccagctg

SEQ ID NO: 565 - DNA, 495 bp, Arabidopsis thaliana
agtactgatagtaatcacttatcaatggacgaacatgtcatgcgttcaatggattgggattccatcatgaaagaattggagcttgatgacgattctgctcctaactcacttaaaaccggtttcaccacaaccacaacagattctactattttgcctctttacgccgtcgattcaaatctccctggctttcccgatcagattcaaccgtcggatttcgaatcgtcttccgatgtttatcctggtcagaaccaaacaactgggtacggttttaattctcttgatagtgtcgacaatggaggatttgatttcattgaagatctcatccgagtcgtggattgtgttgaatcggacgagttacaactcgctcaggtggttttatcacggcttaatcaacgcttgagatctccggcgggtagaccgttacagagagctgcgttttactttaaggaagctctcggttcgtttttaaccggatcaaaccggaatccaatccgg

SEQ ID NO: 566 - DNA, 494 bp, Arabidopsis thaliana
ttttttttttttcaaaccataattttaataaattattcaacctggttacaaaaattcgtaaaaagaccaaagatcaaaattttctggtcactgttacaaaaaaacaattgttgacatcaacctccatctcaggctcttctctttttgttggatctggaggaatgcttatcattgcctctctttttggctgatttatcaaaaccacttggcttctctttcttgttatcagttttggtggactctatactgataagaccacttgaagagatcttagacttttgcaaagcctcagcttctttgtccccaatagcaaattggtcaagtagctcagggtccaacaattcttctatccttgccctcatttgttcctcaacttcttttgctccctccctgagatcttcgtctactgatactttgtgaggttcaagcactctatctttcaaccgaggtaaggtggattcgagctcttttgttgcgattccattcaaatattt

SEQ ID NO: 567 - DNA, 494 bp, Arabidopsis thaliana
tcgcggccgcatacgatatcccacacacttgtggaccagagcctgcaatttgctgtcagtttgatttcgctcggatgcggggatttaagtatgaactttgtccatggggaaagcacccagtggagaccacactagaaaatgtgcaggagagggcattaaagcttctggatcaatacaggaaaaaatccactctatatcgaactaatacacttcttatacctcttggagatgattttaggtacattagtatcgatgaagccgaggctcagttccgtaactaccagatgttgtttgatcacatcaactctaatcctagtctaaacgcagaagcaaagtttggtactttggaggattatttcagaacagtccgagaagaagcagacagagtgaattattctcgtcctggtgaggttggctctggtcaggttgttggtttcccttctctgtcaggtgacttctttacatatgcagataggcaacaagactattggagt

SEQ ID NO: 568 - DNA, 494 bp, Arabidopsis thaliana
ccacgcgtccgagtgtttgcatgtttcagaaagaagataatgaagagatatcgaggtgaaaatttcagaaaagggattgaggaagaggacttggacttgcctatttttgacagaaaaacgatttctatagccactgatgatttttcatacgtgaacttcctaggaagaggaggttttggaccagtttataagggtaagttagaagatggacaagagattgcggtgaagaggttatccgcgaactcaggacaaggagtggaagaattcaagaacgaagtaaaactaatcgcaaaacttcaacatcgtaacctcgtgaggcttttaggttgttgtattcaaggtgaagaatgtatgttgatctatgagtatatgcctaacaaaagtttagacttctttatatttgatgaaaggagaagtacagaattggattggaagaagagaatgaacattatcaatggagtagctcgtgggattctctatcttcatcaagattc

SEQ ID NO: 569 - DNA, 494 bp, Arabidopsis thaliana
acattaagtagcactctttttcctctctatatctctcactcacactttttctctatatcttctcctcaacttggatatgggtgaagccgtagaggtcatgttcggaaatgggttcccggagattcacaaagccacatcacccactcaaaccctccactctaaccagcaagactgccattggtatgaagaaaccatcgatgatgatctcaagtggtcttttgccctcaacagtgttctccatcaaggaactagtgagtaccaagatattgctctgttggacaccaaacgttttggaaaggtgcttgtgattgatgggaaaatgcaaagtgctgagagagatgagtttatctaccatgaatgtttgatccatcccgctctccttttccatcccaaccccaagactgtgtttataatgggaggaggtgaaggctctgctgcaagagaaatactaaaacacacgacgatcgagaaagttgttatgtgtgatattgatc

SEQ ID NO: 570 - DNA, 494 bp, Arabidopsis thaliana
caaacatttccaatgtaattatctgaaccgaccagtttataggggtctcaagtctcaacaacaatcaactgaatataataactgagaccgtaaaacaaaaatgcaaaggtcaaaaaaagacaagtcacagaagaatacaaaaaaggacatggactcatgcccacaaagaagagtggtgagaataatgtcataagaaaaagcttcaacgaagagcaaaactatttttgagttctgagaatccttttctcctcctccttcaagcttacaacacaacattcatcgcacaagcataagacccagagagagcaaaatcgtcaagtaatgattccttttacagattccgacaagcctctatgtctgcagcctgtgaggccaacaaggacttcccctgctcgcttgactccacaatgcgtacagctgcatcgaccaccatcttctggaacctatcgtcttccatcttccctataatttctctaaccaatttgaaatccaca

SEQ ID NO: 571 - DNA, 494 bp, Arabidopsis thaliana
ccacgcgtccgctatctctctcatcttctctcaaaccttcactcgtttcatcaagactcaattcatcttcctccgcatcttcttcttcgtttcctaaaccaaacaatctctacctcaaacccaccaaactcatttcaccacctctcagaacaacttcaccatcgccattgagattcgccaatgcttcaatcgagatgtcgcagacacaggaatcagctattcgcggagctgaatctgacgtcatgggtcttctccttagggaacgaatcgtctttctcggtagtagtatcgacgatttcgtcgctgatgctattatgagtcagttgcttctcttagatgctaaagatccaaagaaagatatcaaactctttatcaattctcctggtggttctctcagtgcaaccatggctatatacgatgtggttcagcttgtgagagctgatgtttcgacgattgctcttggcattgctgcatcaacagcttcgattattctt

SEQ ID NO: 572 - DNA, 494 bp, Arabidopsis thaliana
gcaaacaatgtccaagacgaagcactctcggtattgagcttacactctacaacattgacgaatcagacagtggaaagttggtctcttgtgatgatgatttttgctaccagattagtggtggtcctctctctggctgcaaagctaatatgtcttgtccttatcttgagatatatggagatggtagctctactgctggttattttgtcaaagatgttgtgcagtatgacagtgtagctggtgatctcaagactcaaacagctaatggcagtgtcatttttgggtgtggtgctaggcagtcaggagatctagactcttctaatgaagaagcacttgacggaatacttggatttgggaaagctaattcttccatgatttcccagctggcctcatcagggagagtgaaaaagatatttgctcattgcttagatggaagaaatggaggtggtatatttgctattggacgtgttgtgcaaccaaaagtaaacatgacacca

SEQ ID NO: 573 - DNA, 494 bp, Arabidopsis thaliana
ccacgcgtccgcagcagtagaacttcagaatttggctgaagaagttaccagactctgcaatgaaaacgcgaaactcagcaggtgaaaaagtttcaggtctctctgttgttgctcggagactcccagcttcaagataatgctgcaaagtaaatcatcttcgttgacatataatgcaaatctcagactctacttggaaggtaatgatgttgatccatcaaagggaacaagagatcatgatgctcccaaaggcattcaatccagaaaaaatggtttgtattgcttggatagtattttgattacgtctgatgacaaacacatgatgtaaatattcctcacaaatttgttttcttgttctcagtgaccactatttttgtatgttcttaggttgaatcaatgatgttgcaacaagttccatagttagtttttcagcttaattaactttgtttagctatatgtaactgatttgatattctgaaaattatttggtcaaaatc

SEQ ID NO: 574 - DNA, 494 bp, Arabidopsis thaliana
cttttttttttttttttttgccgttcaaatattattggatctaatgaaaggaaattctacatttgtttttcttttgataagaatgaaaattctacatattaagaaaacaaaaaattcaatggaatttaggaacttgagctttttggatgctctaactttcatcacgggacgagtcccactaatatctactctccaatctctattgcaaaaactatcaaaagaaaaagaaaaaaaaaaaagtttatggaccaatcctttgagttggctactctgaaaagtaatactccctcatatgtttagataccaaaaaattgaggagttccaagtgttagcctttgatgggggttgagatacgtcaagcggaagttgcaagaacatcctcagtaggaggctgcattggtttttgagaacgtggtggtggtggtggtggttgtggctttggcggtggtggtggaggtctctttggtttcaccttattgactatctcagcttca

SEQ ID NO: 575 - DNA, 494 bp, Arabidopsis thaliana
tttccaacttctctttccttttattcaatcaaacaagtcttttacattaaaatacaattaacagtttaaaaaatggctttattcttgtttttctcaaacattaagaaactttttaaatacaatcagccgaaaaaaatacaagaaaaacaattatatatataaatcctcgaagagaattacaaaatccttttagcagacaacagtagctgctccggaagacacagggcttgcaacatcaagcatcatgggattccacttcatcaccactttatcaccgcatcttccatctgatgaaactccggcaaattgcatctgatctgcttcaacagaagacggatttggtacctccaatgtcaacttcttctcagctacagacttgagtctccgcctctctgctcttgacccaatcacctgtcccaaaactgatgctgctatggtgaataccatagctgttttaggcatcaacactgactttctcagtattcctatgaatg

SEQ ID NO: 576 - DNA, 494 bp, Arabidopsis thaliana
ctcccctgaagctcccctcactcactcttctccgaggaagaacaacagagacaatggcggttcccaaagccattattctacctatcttgctactcatctgtggtgctgctctcggagctcctgcttctgaaggttatcttcgtaatggaaacttcgaagagtcaccaaagaaaaccgacatgaagaaaacagttctactaggcaaaaacgccttgcccgaatgggaaaccaccggtttcgtcgagtacatcgccggcggtcctcagccaggaggcatgtacttcccagtggctcatggagtccacgccgtgaggctcggaaacgaagctacaatctctcagaagttagaagtgaagccaggttctctctacgcactcacgtttggtgcgtcgagaacttgtgcacaagacgaagttcttagagtctctgtaccttctcagtccggtgacttgccacttcaaacactttacaacagtttcggaggtgacgtgtac

SEQ ID NO: 577 - DNA, 494 bp, Arabidopsis thaliana
gcggccgcatgaacctacctataaaggttttatgaatgcagtcatatgtgatgtgactttaggttcatacatgcgtttcaactacagtttaaaaggatggattcttcatttacatgttatgaaagtagaggtaaattctgcattgtaaaactcaccacagaagaagaacgattctgactaaacatcgtttatcagacaagacaaaaatgtagaatcttctccagctgggcaaaagtgttatgtgaaatcccctttgattcgcttatctactatgctttgacatacttgtctacataacccataaccagtttggtaagcttctgctgtgaagaatcaatgtacttatcgatcttagctcttgatttgggaatacgacgaccctccattgagtttgatactttatccaccactctcttcacaatagtcttaaacgcctccttgctcatatgcccttgtctccacgatggtttcagaagatccttgacgaattttgt

SEQ ID NO: 578 - DNA, 494 bp, Arabidopsis thaliana
  misc_feature (1)...(494): n = A,T,C or G
ccttttttttttttttttttttgattcacctaaagtaggtttttagatccttgaaagaagattatatacattattttatgttttctgtacatattaacgcccgaccaaaggtccttagagaataagtacataggtggcttgcttgcttagtaattaataagaagatgaaatatttggtgaaaatagagaggagtaaaatgaaatatccagcaagaggtctctattatggagatccaaatccaaatgtgttttctccgctgtaagtgacatagaggaacccatcatcatcctttttctcttcgtacacagaagacatgagcgcacctgctggaggaagaacattgtccacgaatatgaagatagccttttctgcactcaatttgattcttttgcgaatgacatacacaaactgccccacagtcagatcagccgggactaggtnctttttcttgtcgatggttggtatatcactcttctcagccttctcaacaatc

SEQ ID NO: 579 - DNA, 494 bp, Arabidopsis thaliana
aattttatatcaatacctttccactaatattgagcctagtggtgaatggcccaatgacaaaatcccaagtcaaaaacattagctaatataagtagtaatctgtgtcttggagatagaaccaaaaagaaaaaacagagagaacaaaaagacttagcagagctcttgaaaaagagactatacatatatcaaatcaaagcagaagaaggattatactctatatctctgtgtgactgacttagagacctttaccttcgtcttcgtttaagattcggttacggaagtcactaaccatgcgaggcagtccctccctcagagatatctttggttcccagttcaactgttcctttgctttgcttatgtctggtttcctcttgtgaggatcgtctgctgtgtttggtttgaactctatggtcgcgcttgggtcgatcacctccttaaccacctctgcaagttcaagcattgtgaattctccagggttaccaaggttgaagggt

SEQ ID NO: 580 - DNA, 494 bp, Arabidopsis thaliana
taaacgcccttcgtcttcttccctggaaatctagtttctttcttccacgaaaatgagagagtgcatttcgatccacattggtcaggctggtatccaggtcggaaatgcttgctgggagctgtactgtcttgaacatggcattcagcctgatggccagatgccgagtgacaagactgttggtggaggtgacgatgctttcaacaccttcttcagtgaaaccggtgcaggtaagcacgtcccacgtgctgtctttgttgatcttgagccaactgtgatcgacgaggtcaggactggtacttaccgtcagcttttccaccctgaacaactcatcagcggtaaagaagatgcagctaacaatttcgcccgtggtcattacaccattgggaaagagattgttgacctgtgcttagaccgtatcagaaagcttgctgataactgtactggtctccaaggattcctcgtcttcaacgctgttggtggagggactggatctg

SEQ ID NO: 581 - DNA, 494 bp, Arabidopsis thaliana
  misc_feature (1)...(494): n = A,T,C or G
ttttttttttttttttttctccacaactaaaaattaactttccactgtttataatttagtttgacaggaaaaagaagattctactctttaaaattatctaaccacaaaaacgagtatttaaattgtttgtctttttctttttttccattgaaataacaagactttaagggtttgcactctgcagagtccactcctttccaaaagactcaatcctttgacgttataacgagtaaacccaatgcacctatgagaatatacttgatgataggcttttctgtcatgataatagtcacccatccaacataaggcaagaacccgacagcacgacccattatatgatgtcgatgaagccaaagctgtccttcagcatacagaagtctgtcatctccatagttattgtcacctttcgttagaacatcaacttctcctgtattnnncctttcgtgaaccttaatgacacgatggacaatgggaatatcacgaccatcaacatt

SEQ ID NO: 582 - DNA, 494 bp, Arabidopsis thaliana
cttttccacttggcggctccggcgatctttgtctacgtcatcaacaatggcatgtctatgctcactcgtatcttcgctggtcgtttgggaagtatgcaactcgctgccgcttctctaggaaacagcggtttcaatatgttcactcttggtctcatgcttggaatgggaagtgcagtggagacattatgtgggcaagcgcatggagctcatagatacgacatgcttggagtctacttacaaagatccacgattgttcttgtcataaccggacttccaatgactttactcttcatcttctcaaaacctctcctcatttccttaggcgagccagctgacgtagcatcagtggcatcagtattcgtctacggtatgatcccaatgatcttcgcttacgccgtcaacttccccatccaaaagtttctccagtcgcaaagcatcgtcacgccgagtgcttatatctcagccgcaacactagtcatccacttaatcctctc

SEQ ID NO: 583 - DNA, 494 bp, Arabidopsis thaliana
caattctctctcatacaaagatattgaaattcagaaattatttatgaaaaactatatagagaattcaaattacgtaaaacaaaaagaaaaagcagcgggaagagacgtgagcttattgcatcatttagaagttgtagttctcgtcttcgtggagcttttcatcgtgacaacaagagaagctcatgtacttctccatcggacgctgacactcgaagcaattcatcttctccggaatccgaccgctccgagcagtgatgtggaaatcaaagtggccgcaaggttttccggtttcacggaggacctcatcgtggtggtggtcggacattgctttggtgtagcctttggtcgggacgtgggttttccaggtccggtcgtaaacactcatagtcctctctatggcaccgtgagcgatcatcactatctcaggtcctttgctcagtagtgcccatcctccaagcttgtcgtagcttagtatctttttgattccttgcatc

SEQ ID NO: 584 - DNA, 494 bp, Arabidopsis thaliana
ctttcttcaaatggcttaaaccgggaggtaaagttctcatcagcgactactgtagaagccccaaaactccatctgctgagttttcagagtacatcaaacagagaggatatgatctccatgacgttcaagcttatggacagatgctaaaagacactggcttcactgatgtgatcgcagaggaccgtactgatcagtttatgcaagtcctgaaacgtgaattagacagggtggagaaagaaaaggaaaaattcatctccgacttctccaaagaggattacgatgacattgttggaggatggaagtcaaagctggagaggtgtgcatcggatgagcagaaatggggacttttcatcgccaacaagaattaagcaaatcgaaatctactacttctatgttttcttctttctttgtttgttcaataaaaatgtcatttccgctaggtgatgatatatgcctgtagtgtgttatgtggacttgttgagtggtgttaaatc

SEQ ID NO: 585 - DNA, 494 bp, Arabidopsis thaliana
taggaagaagagtatttgcttacaaagtttacatagcacaacgaaatcattttttttactgttttacacaacaatcacaaaacccaaaggtaaatgtatgtattaattactataaaaatgttatcaacccgagaagctgcattacacggcaaccgccacagccgcattaacggcgacgccttcaccgataccgccgttgcattttccgttaagaacaacgacgtcgtttctctctttgggtacgagactcttcatcatcacttccaaatccctcttgtgcacgttgaccaaaagtccgttcttcatgaacaaagtcaacgacatcttctgctccaccttgtgtcccggcgccaccgttagtctatgcctgagtaaaaccgccgccgcgatcgtcttcatctgcagatacgctagatcttttcctagacagatcctaggtccggcgttaaacgccacgaatcggtactgatcgtgattcacgaattttccatcgt

SEQ ID NO: 586 - DNA, 494 bp, Arabidopsis thaliana
ccacgcgtccgagcttcaacaacgtcaagcaatggctaaatgaaatcgaccgctatgcaagtgagaatgttaacaagctactggttgggaacaagtgtgatctcacatcacagaaagttgtatccactgagacagctaaggctttcgctgatgaacttgggatcccattcttggaaacaagtgctaagaatgctaccaatgtcgaagaagctttcatggccatgactgctgcaatcaagaccagaatggcgagccaacctgcaggaggatctaagccaccaacggtccagatccgaggacaacctgttaaccagcaatcaggctgctgctcctcttaattcgctttggtaacacttaaccatattatgtcattcgtttgcatgtaagaaatctaaacaacgttgcttcttaaatcttttgtatttggtttttcaatttttcacttgtgtccaaaagcttttaaattctttgtaatggtacttggattattaata

SEQ ID NO: 587 - DNA, 494 bp, Arabidopsis thaliana
ttacataaatgatatattgattattctctgagaatattctcttctcaaaaccaacaaatttcagatattatcatcatatcatgtttgaaaagtagaaaaacaccaaattcaaatttattacgattcttaaatcaaaaatcaaaaacagcaaatacaaataaagagctcaatagacttcaacgtgccactgcttgttcttcctgagctgagaaagcttcaagtcccagctctcacctctctcttctgcaactctcttaagtgtatcttgaatcccaggcatcattcctttaagcccacagaagtaaatatgagctccattgtccaaaagcttgaagatctcatcactatattcttcaatcttgtcctgcacgtacatctttccacctttcttgttcttctcctctctgctcaatgccttgtcgaacctaaagttgtctggatggtcttttaggtacttggtaaactcttcgtcatagagaaggctatcggtgttg

SEQ ID NO: 588 - DNA, 494 bp, Arabidopsis thaliana
tcgagcggccgcccgggcaggtaaaatactgtgttctttgtttcttccatcgaaatcgaaaaaagctaagatctttgcgttttgaaacgatggcggaagaacataagcatgatgaatctgtgatcgctcctgagccagctgttgaggttgtggagagagaatcgttgatggataagatatcggagaagatccatcacggtggtgattcttcttcgtcttcttcatcttctgatgatgaagacgagaagaagaagactaagaagccctcttctccttcgtcttctatgaaatcgaaagtttaccgcttgttcggacgagagcagcctgttcataaggttctcggcggtggaaagccggctgatatattcatgtggaagaacaagaagatgtctggtggtgtacttggtggtgctacagctgcttgggttgtgtttgaattgatggagtaccatcttctcactctgctttgccacgtgatgattgttgttctcgct

SEQ ID NO: 589 - DNA, 494 bp, Arabidopsis thaliana
attcaaaatcacgatatatacaaaacaagttacttataaacagttaaacaccacccactcacttctcttcctcttcatcgcccacaacaactaaaaatactcatcaacaaaaaacaaacaaactcgtttaaattaaacgttcgttaaaaaccttattactaaaacaaacaccaaaccacccaccatcttccattttagagtctctccctctctcaatatctaaaatgtaggtacaagtccgaacccactaaagataccaccatgaccaaccacatcattgctctcatttgtatccgtccgcttcgcaaaccgtcccttgattctcggtctcatttccgcatacgctttccttgaagcataccttatagtcttctcaaacttcctgttcttcctcttctctctgtacctcattaccctcgcttctctctcagctgaagtcagcggaacagcccgctgtgtccccggatcagctccactggttgcaggaccaccgt

SEQ ID NO: 590 - DNA, 494 bp, Arabidopsis thaliana
tttcattgattataattccaatcactcgattaaaagcgaaagaaaaaacaattacaccgaaggaaaattcacaaaagagcaagtggacaacacaaatataagaaagggaaatgaaaactgcaaagtgactgatttagattttgtacagagagattacaacttcatttattcttgagaaatctggtttggtgtgtttagacgttggcagcacttctgaatgatccgagagacttagaacctgaagctctcagaacgaattggtggtagaatgcagctatcgcagctccaatgaatggtccaacccaaaatatccagtggtcatcccatggcttgctcttgttgtagattacggcagctccgaaactccttgccgggttaattccggttccggtaatgggaatggtagccaaatgtaccatgaacacggcaaatccgattggaagtggcgccaacaccggaacgtgggagtctctagcactacgtttggggtcagt

SEQ ID NO: 591 - DNA, 494 bp, Arabidopsis thaliana
tttttttttttttttagtgaacatataataattaagttttatatgcatacactatgaaatcaataatacttaagatcaaaagaaaatcaaattatccttgtaacataaatagtgattcacgaaacaaaagttttgcttgcttccacatagtctccataggcgtcttcttctctgctttccaagctctttatcctgcaatacttgtagtagatatactgcagtattataaatagatctagtacgacgcagacaatagcatcaagcaaccaaggaaggtttggtttgatgttgtcccattcagttgttcggacaagaatactaccaacatatgttgcattggctactagcgcgaagatgaacatcagtggattcaaaccctcgacgcttcctcttttgatgttgagccaaatctgaggaatgcgaccgcccatgtaaatggcagccattagccatcccaaccattgtcccaacgcgctatgctctactattctttc

SEQ ID NO: 592 - DNA, 494 bp, Arabidopsis thaliana
agcttgaatgttcaaattgggtctccaccatcagagctatctgtatctttaggaagtgacgaatcagaacgacttcctggagggtttgttcacaatgcatcagaaaagccattgcaatcatccattcagttcccaaccatgagcactgatttgaatagtcaatacgacagttctgagctccctacaataccttatcaggagtgcatagaggattttggttctgaggagaacaatcttttggctgaccatgcagctcagaaccacgagctcgtttactctcaagcgtcgtcattgcagctgcctcaggttaaacacgaagatttcaaggacgatgctgatgtgcatgaatctcaaagttcaagcgatgatcaccattgtcctgaaaccaaatccctgacgccaactcaatcaacaaaggtagaagataagggtcattcggttcctgatgcttcaaatgcagaaactgcagaatcatcaaacacgtcagttcagaa

SEQ ID NO: 593 - DNA, 494 bp, Arabidopsis thaliana
gctccaatctcttgctattatacaatataactcaagcttgagttgagttttcccaaataataataatctatacttcaaaaaaattaagtctacacataaacaaagaatccgtgactcttcctaattaccaaactttaccacatctatcttacacacaatgcattcagcaatacgtgaacgagcatcaagtccacaaagtactgatgtccaatctcaccgtccctccaccgcattttcgctggagctcttccgtaatgaactccatcgttgcaacggttatcgtagtgccacggatacgtcatatcgaagttatcaactacgctcgtgaccaatcccgcatccctcattttctcgagaaacactccgttaaacgcctccattttgctcgggttaaacgctagcattctcgcgtacccgcctgtcgcgattgtgttcctgaaaatcacttctggcggttgcaatcctctgcttttgaccccgtcaaaaacttctct

SEQ ID NO: 594 - DNA, 494 bp, Arabidopsis thaliana
tgagccaaaattcattacaaaaattctattaaaggaaatcattgcttcatctagtattttaatataccattcagttagaagtttactagattgaaaatttatgacattcaaaaaactatcgatcctatgtcacattcagtaaaaatttatgatacttgtataggatgtactcaatgtgtccgagcatgccctacagacgtattagaaatgataccttgggatggatgtaaagctaagcaaatagcttctgctccaagaaccgaggactgtgttggttgtaagagatgtgaatccgcctgtccaacggattttttgagcgttcgagtttatttatggcatgaaacaactcgaagtatgggtctagcttattgatacgttaccgaaaacctcatttgaataaatttggaatacattttattttttttattgacaagtactcgtactcaaaaaagttaaaaattttttatttatatattttttttgagtacgcgttc

SEQ ID NO: 595 - DNA, 494 bp, Arabidopsis thaliana
gatccaaaccaacgtatcgcgagaatctctgctcatctcaatcctcctaatcttcataatcagattgctgacgggtcaggtttgaatcgggtggcttgtcgggcaaaaggtggatcacccggattcaaagtggcgatacttggagcagctggtggaattggacaacctcttgcgatgttgatgaagatgaatcctttggtttcggttcttcatctctatgatgttgctaatgctcctggtgttactgctgatattagtcatatggatactagtgccgttgttcgtggatttctcgggcagccgcagttagaggaagcacttacgggtatggatttagtgatcatacctgctggtgttccgaggaaaccagggatgacgagggatgatctgtttaacattaatgctgggattgtgaggacactctctgaagctatagctaaatgttgtcctaaagcaattgtgaatataatcagtaatccggtgaactccacggt

SEQ ID NO: 596 - DNA, 493 bp, Arabidopsis thaliana
cgagcggccgcccgggcaggtactatgcggaggaggcaaaacgtgtatatggtgatataattcctccgaatctgtctgatcgccgactgttggttctaaaacagcctgtcggtgttgttggtgcaattaccccttggaacttccccttagccatgattactcggaaggtcggccctgctcttgcttctggatgcacggtggttgttaaaccatctgaacttacgcccctaacagcacttgctgcggctgaacttgcacttcaagctagagttcctccgggggcacttaatgtggtcatgggaaatgctcctgaaattggggatgctttgcttacgagtccacaggtgagaaaaatcacgttcacgggatcaacagcagttgggaagaagttgatggcagctgctgcacctaccgtcaagaaggtttctctagaacttggcggcaacgcaccctctatagtatttgatgatgcagacctggatgtagctgtaaa

SEQ ID NO: 597 - DNA, 493 bp, Arabidopsis thaliana
cgacaccaaccgtgtcggtctcgctggtctctatcaggaagcttctatgctcaccttcgaaggtcaaaagatccaaggagtccagagcatcgtcgctaagctcacctctcttcctttccagcagtgcaagcatcacatctccaccgttgattgtcagccttctggtcctgcttccggtatgctcgttttcgtctccggtaatctccagctcgccggagaagaacacgctctcaagttcagccagatgtttcatttgatgccgacgccacaaggaagcttttacgtgttcaacgatatattcaggttgaactatgcctgaacagaaatcagattgttgttagcatacatcattgttgcatttctatactatttgagcaaatccttctatcaatttttctcgtctttttcttgttattcccagatgatttaccttgggaacagaggaatattgtctctcatcatgtatttggtttggattgtttagacccgagca

SEQ ID NO: 598 - DNA, 493 bp, Arabidopsis thaliana
  misc_feature (1)...(493): n = A,T,C or G
cttcccttcagagatacactggatacgtattcggctgaactgaaaagcatagctaaggtcttattcgcgaaactagcgagtgcactcaaaatcaaacctgaggaaatggaaaagttgtttgatgatgagttaggtcagagaattaggatgaattactacccgccttgtccggagcccgataaggctattggtctaactccacattccgatgctacaggactcaccatactgttgcaggttaatgaagttgaaggtctccaaatcaagaaagatggcaagtgggtttctgtcaaacctctcccaaatgctttagttgtcaatgttggagacatcttagagatcataacgaatgggacataccgaagtatagngcatcgtggagttgtaaactcagagaaagagaggctttctgtggcgtcattccataatacggggttcggtaaagaaattggtccgatgagaagtctcgtggaaaggcacaagggtgcacttt

SEQ ID NO: 599 - DNA, 493 bp, Arabidopsis thaliana
agagatcagaagctatagctatacaccaaaactaggtatagagagagaaaccctacaaaatcaaaaggaagaagagacgaagatgaagaagatccagcttggatttcgttgttcatcattactactctctttcttcttctagctagctagttttgacagcaaaataagaagcaagaaaaaggtcaactaaaaaagatctgttcttagatcactcttcttctttttttgatccaattccaccattgaatcatagatcatggatccagtacaatctcatggatcacaaagctctctacctcctcctttccacgcaagagactttcaattacatcttcaacaacagcaacaagagttcttcctccaccatcaccagcaacaaagaaaccaaaccgatggtgaccaacaaggaggatcaggaggaaaccgacaaatcaagatggatcgtgaagagacaagcgacaacatagacaacatagctaacaacagcggtagt

SEQ ID NO: 600 - DNA, 493 bp, Arabidopsis thaliana
aatctatctatccgagaatggccaagatgggcttgaaacccgacccggctactactaaccagacccacaataatgccaaggagattcgttacagaggcgttaggaagcgtccttggggccgttatgccgccgagatccgagatccgggcaagaaaacccgcgtctggcttggcactttcgatacggctgaagaggcggcgcgtgcttacgatacggcggcgcgtgattttcgtggtgctaaggctaagaccaatttcccaacttttctcgagctgagtgaccagaaggtccctaccggtttcgcgcgtagccctagccagagcagcacgctcgactgtgcttctcctccgacgttagttgtgccttcagcgacggctgggaatgttcccccgcagctcgagcttagtctcggcggaggaggcggcggctcgtgttatcagatcccgatgtcgcgtcctgtctactttttggacctgatggggatcggtaacgt

SEQ ID NO: 601 - DNA, 493 bp, Arabidopsis thaliana
ttataggaagacatactctcagacgattcatccgattccagataaaagtcattggagagagctttctgaaggagatccaaacgtgaataaagctgctcttgatgctattataaaccctccaaagtctctgagacctcctggtaggccgaggaaaagacgggttagagctgaagatagaggacgagtgaagcgggttgtgcattgtagccggtgtaaccagactggacatttcagaaccacttgtgcttcacctatttgatttgcaacgacagcatgctctctttatgtttcaccagaacaatactgcggactcaactgagttatcggaaaagaagccaaaaaactctgctcagtgtactataaaactttgatctttcttgatcaattgctagatttcaggcaaatacctagagaacaattttacattgcctgtttgttgaatcctttccttacttatttaatatgctcagctcgagcagttacgcataaactc

SEQ ID NO: 602 - DNA, 493 bp, Arabidopsis thaliana
cacagacaacgtatttttaatagaaacctacaatatcccgctttatatattctagaagaagaaagtacatttttcaccaaatgcatagaagaaggagacttttatgcagcatcctaaccattaccaccattgatggacaagcacccctctttgtctgagcgaattgaagagctctaagcattggttataagtcttgttgtacttttggctcctttgaccaggacaacatctctgccacctgttgtaatggcattcaaggaacaactcatctattagacaaatcgctcctgtcttgattagcctcgggatcagatcgaattcggttccttcaacatccatcttcatcacaacaaagtccctctctctcacactcttcttcaaccagtcagcgaaatcaaacccttgaatcaaattcacctctccagctaagtcactcgagtcagactttttaaccggctggattctgcccatccccctgccctttgctttggct

SEQ ID NO: 603 - DNA, 493 bp, Arabidopsis thaliana
  misc_feature (1)...(493): n = A,T,C or G
gcggccgcacacgtgtaatcagtgttaaggaatacaggagcggagaagagagatggattttgggagatggttggcgtcgagagtgaatgagcagatgatccttgtatagaacttggaggtgacgagtcttcccaaaatgtaagcttttgaatggaggacgatagtgagattaagcggcagggagagtgtatcaagatggaaagaaacaccaccgtagaggggaatctgatggccttgcaccaccgtcactacgttcgtttcgccatttctaccaaccgtgaacttgttcatctcaccggaggatagtaggaggttggagtagtgaaggagaagaggagaagcagtgacgtggacggcaaagaaagttgatgggttacggtaatatatcctgaccgtcgaattaagagacaacatgtccgnnnnnnctccgctaagatcgttccctgcctgcaagttcaagtccctcaccagcatcccctttacagtaactttg

SEQ ID NO: 604 - DNA, 493 bp, Arabidopsis thaliana
agtgagtaataaacatatttgatcttttgttcaataagtttgttggagatagcaaataaaaacatagataatgtagtaaaaatatagatgaagaaaagagaaaacatgagagtttgtttacattgagaggaagagaaagaaagagaaggaccacatggattagattctagagggaatgagaggaatgtggtgctgaagataagtagaggcagctgcaactccacttcccattacaactgggtatccaacatccttcagtatcatctccactcccgcaagacacccgagaagttgcaactcattcacatttcctaggtgtccaattctgaaaacctttccagccactttgttgagaccaagaccaagacttaagttgtacctctgccatgcccttctcacaatctccgaaccgtctatatgcggaggcaccataactgctgtcactgtgttacttatccattcctccttctgtgtgcagtttttcagcccccat

SEQ ID NO: 605 - DNA, 493 bp, Arabidopsis thaliana
cttttttttttttttttttgattaaagataaagaggagtataatttatttataaaaactattcagggactttcagggaagagtttttctatgcgaaaactatcttatactatatttaaaaaaaaaaaaaccatttgaaacgtagaggatgacaagaagacaactctctttacacaaattgtatattcatgattttttttcctttttaaaaaaaataaaaacattacaaatcccctctctccatttgctgatcaatgaccattcgatggcctgaactcggtgtagccattaataccagacgtaaaacttggattcgaagcgtccaaaccaaagtaactgtgatggtaattagctgctgatgatgttccatcttccattccattgctcctcattgctggcaacgacaagtccatgttcgtcatttgccactgtctcggcatcattccgtctgtaccatatggtccacgtgccatgtaatgcaatccttcctctcc

SEQ ID NO: 606 - DNA, 493 bp, Arabidopsis thaliana
ttttttttttttttttcatcaccctcttagctggaaaaaccagagattcagtgttttaaccgatacatatatgacatatctaactaacaattttatggaagagtgggaaggaagatgagactgtgtggaccttaattaagtttgttatgtaccaacacatagtgcatttgtgtgaatgttttgagttacattttgacaagccggacgtcattctggccaaaggcggtaccgcagcctggacatttccggtgtcggatctctaagctacgttggatgcattgctggcagaacagatgataacatttcacaattaccacctctttaggccgatcaaaacatacaccacatttgaggatgtttttgcaattcttaacttcttcctggagcctcacaattgcagcttctacactctcagaacccaactcttcaagctctttgttcaactccataagctcttcctcaagcttcttcttctccctcctttcatcatcca

SEQ ID NO: 607 - DNA, 493 bp, Arabidopsis thaliana
ctctctctctctccatcgagaaacactaaactgctataatcattacctctcttcgatttctcaaaccctatctggctctctacccatatgcttcagatccgcattaaaaaagctaagttttttgttatgtccttctttcttatttgatcagtttgttcttgtttcacgattttaacctgagattttttatatattttctccagatctgctatccgcagtcatctgttcataggaaaagatctggctttacttttagagattatctcagatccagccttttacccaattgaaggtaggtccatatgctgaagatttatcgcaggagcgaccactacgggagccgccattggagattctctgtgagagagagagagagaaatagtttgagaatcaatcttctgtattttattgtgtagatcaagttatttagtatatgctagtacttatggttaaaatagactattattaaaattcaaaagtaataaagccaacg

SEQ ID NO: 608 - DNA, 493 bp, Arabidopsis thaliana
cgagcaatcaaagtatgtttagaaggaggcctccaagggattgtctcggaggtgaagggagtattccgcaaccccgctcttgtcaacaagataaaagaatccaagctctctctgatgacatacggaaagctaaacaatgtagccgaggcggtttacatgcagcatttgatggggatagagggagtgatagttgatcatgtggaggagataacagaggcggtgagggagatgatgaagccatccaacagagatgctgatggtactaagccaaagcctaacttctctgacagagagctctcctttcttctcaagctcattcccgagttgatacaacactaaaactatctcttttagttaggatctctagtttcccaaaatgtgatagtgttttgtatcgggaaaatttgacaatgtgggtgctgctatcatgattcatgaggtgaaagcccaaatgttatggaatatatctgtttgcagaaaaaaaaaaaaaaaa

SEQ ID NO: 609 - DNA, 493 bp, Arabidopsis thaliana
tttttttttaattattaccatgctctggcaattctaaggacaccatccccagtttttcttatacattaaactgtaaaaagctgatagactaaaaacaaatgtgaactcgagttacagaaattaggagatgcaacttagttcttaatttaactgcaaatttgattccatgtccttaataattctcaaaacacactggaattttaacaacagccataatctggttccacttctgctttctcttcacttgtaaaactcaaagtccgtgtctggcttcttaacatttgcgcggtagcccttctcgaaatccttaggtagtatcacatatctgttctttcgcaccgcatgcataccagcttcctggcaaattgctgctatctcagcagcgctaattttatcaggccgtgaaacatagtcttccaagtcaacctcatcgctaaggttcattttggaggtgcatacctggaaaacaagcctcttttgacgtctatcagga

SEQ ID NO: 610 - DNA, 493 bp, Arabidopsis thaliana
aaatacggcaataataataatatcaaaagatattacaaatcaaagtcaaatgaaacttggttcagtaataaagggaaatgaaacttacttcagcaataaagggaaatgaaacttggttcagcgataaaggggaatgaaacattcaaatatccaaatcaatgcaattatgcattattaataaaagtcttcaaacatttgaagtaaatatatttcgattagcagataccactcgtcttcttcctgtcggcgacaaacttcttccagccagtgatgatatctctctgcttgtcgatatcgctcttcttcaccgtgaccatcaagttatcgctgttagattcactcttctcttgtccaagtgatattttgtgaatcactctcgaaggaagctcatcgagctcacgcatcactttctctatatcgatcacaagtctctcagcgagtgttctcgagaaatcttctctgataaccacacgaagaacagtgatgtgttgtg

SEQ ID NO: 611 - DNA, 493 bp, Arabidopsis thaliana
tttttttttttttttttttttttttttttttttttttttttttttaaaatcaaatactcttcttctcaaactacaacaattgataaaaaaaacagctcaaactcgcaggctaataataacctgagcgaatttcatctctctctcctccctaacatgattgattctctctaccaatacaataacaaaaaactaccaaaaactgtgattttgaagaagctccaaaattcagagaacgagggcgactttctcatgagatatcagaggagatggattcgctatcaagggctcgtaatggtctgctccaccaccacaccaaccagtgcctttcatgaatagaaagactgggacttcaagaacttcacttcttggtttgtgaggaagaaagaacacacagttctcttcctctaccatcccatctgatccatgcgcttgcaccacatagatttctcgtttgaactcagtggctagacactcgattgctatgtcatcccca

SEQ ID NO: 612 - DNA, 493 bp, Arabidopsis thaliana
  misc_feature (1)...(493): n = A,T,C or G
tttgctatcttagtttaccaaagtttttattcatacgaaatccaaagatttttgagtttctgagacattattttaccgtacatgaaaagacattcttatgaaaagaaagaacaaaaacataataacttccactcgtcagcataacttccaaactttggatcaatcttggtttccggagacgtctttaagcttctgctccaattcaccttccttgtgcatgttaaggatgatgtctgagccgccaatgaactctcccttaatgaagatctgtggaaacgtaggccagtggctgaaggatttcacagcgtttttcaactcttggtcttctagaatgtttctagaactgataggaacattatattgctgcaaaactctgacggctagtgagctaaacccacactgaggagattcagggacanctttcatgtagatcataacaggattatccttcacatcattctcaacgatatctttaagtgagtccgtagaatcg

SEQ ID NO: 613 - DNA, 493 bp, Arabidopsis thaliana
  misc_feature (1)...(493): n = A,T,C or G
tttttgctactaccaccaagatctgcaccgacggccgctccgcccgggctcgcgccctaggttttgcagcgaccgccgcgccctcctactaatcgaggcctggctcttgccccgacggccgggtataggtcgcgcgcttaagcgccatccattttcggggctagttgattcggcaggtgagttgttacacactccttagcggatttcgacttccatgaccaccgtcctgctgtcttaatcgaccaacaccctttgtgggttctaggttagcgcgcagttgggcaccgtaacccggcttccggttcatcccgcatcgccagttctgcttaccaaaaatggcccacttggagctctcgattccgtgtgacggctcaacaaagcagccgacacgtcctacctatttaangtttgagaataggtcgagggcgttgcgcccccaatgcctctaatcattggctttacccgatagaactcgcgtccgagctccagctat

SEQ ID NO: 614 - DNA, 493 bp, Arabidopsis thaliana
  misc_feature (1)...(493): n = A,T,C or G
tgggatgtacttgatggaagttgaccgtgtgcttagacctggtgggtactggattctgtctggtcctccaatcaactggaaagtcaactacaaggcatggcaacgtcccaaggaggaccttcaagaggaacaaagaaagattgaggaagctgctaaacttctttgttgggagaaaaagtatgaacacggtgagattgcaatttggcagaagagagtcaatgatgaggcatgccgatcaagacaagatgatcctagagccaatttctgcaaaaccgatgataccgatgatgtctggtacaagaaaatggaggcatgtattacaccgtatccggagacaagtagctcagatgaagtagctggtggtgagcttcaggctttcccagataggctcaatgcagtgccgcccaggatctctagcggttcgatctcngntgttactgttgatgcctatgaagacgataacagacagtggaaaaaacatgtgaaagcctac

SEQ ID NO: 615 - DNA, 493 bp, Arabidopsis thaliana
agctgatttgagtaaaaagtttacagatgaatcaatcaaaaaggcttcatctcagttgcaattaactctatgagagaaccaaggcagaaactatcatatttacaatgcaaagagcggtcatcttcagtactcaccggaaccaatattccatctttgaaaacgaatactggttcaagccaagtcttaggtcttcgatatgtatttccctcatctaagctcccttgcatttcagcagaatgactgcaacattcgacagaggcaagaaaattaccggataagcgtttgcaaaaacatgcttcgttttctggacattcctcatgatctttgaccttcgcttcctgcatggtaccattgtttttcacagagatgaactttctaacagcagaaataagctccactgataatgaagaaaccgcatcatgtataccctctgttgtgatggaactcctaccaagtctcaattcgcgagtaactaatttatgcattgaatctt

SEQ ID NO: 616 - DNA, 493 bp, Arabidopsis thaliana
cggccgcccgagttcttcagtagcttcacaagctggacctgaaaatagatcttggcgcatatcaggagtgtgattatggttatctgaattcatgtaatttgaagggattttcacgagctgtgatcgggtcatgaatgcgtgtctgaggacatgcttgaaccaaggggagcggacataccaatattgttcctggttttggttgtacttcctgtggtagcttacattttattaggaaaatggagtaacatttctgaaaaaagagtaagggctaacttgctggctcagatggcagctgaagaagctttaagagctgagaccgtggttaatgcggatagaggtgtaagatttgagagtgtggctactgagaatagggctcaaagaaccaggaccaagactgtttctgctggtggtggtgctgtaagagcagagtttgacgctggtgcgagagaaactgtagccgagcagagatctgattccgtgactgctacatgtg

SEQ ID NO: 617 - DNA, 493 bp, Arabidopsis thaliana
gcttgattttcggtttcctgttggagctccaatccatggtattcgcgcatttttggtcacaaatcaactcaagccctatgacaaactaaggaattcactggctcttgcattaagccctgttgttaaagctcttgtcgaccccgatggagcaatgagagacattcgcaaccttgacagcataagtttctcggattggttcctgtcaaaaggtgggacacgggcaagtatccagagaatgtgggatcctgttgcttatgctctaggtttcatagactgcgataacatgagtgcgcgatgcatgcttacaatattctcattattcgctaccaaaacagaagcttctctgttgcgtatgctcaagggctctcctgatgtttacttgagtggtcctatcaaacaatatatcacagatagaggtggcagaatccatctaaggtggggttgcagggagatactttatgataaatcagcagatggagaaacttatgtcact

SEQ ID NO: 618 - DNA, 492 bp, Arabidopsis thaliana
ttttttttttttttcttgttaatagtgactttgttactacatgcaacaacttaaaaatatagctcaagcaatgtgatcatgacaatagagaagcaaaggaatcattgatcttcaagtttatcatttcattacactcaatagtataaagattaaaagcagaaatgggaacttaggaggaggctgcagtagcagcagcagcttgcggtggcggtggtgttggtcggagagtgatctcaaccttatcgtgaacgccttgaagcaaaagttcaccttcaaatgcgactattttgcgtttcttggcagctctcagagtcccaaccaatgcttcaaagatgttggcacatcgatcgtcattgaacaacactccaaacgtcaccttgtaagagccatcggtctgacgagaaccaagacgatggatctcttcttccagtttctgaatctcttcgtctacgttcattctttcttcttccttagagatttccggacgcgtgg

SEQ ID NO: 619 - DNA, 492 bp, Arabidopsis thaliana
tttttcagcagcagtgagaatgtcgtcgtcgtcgcgtttagggaagaaattgaatttcttgtgaggaacataccaaattttggtggtagctctttgaggatctctgtagaatggtctaatgaaatgtttgtagatatgttctgctccattgaattgtggtaacactaaccaacagatcccaaacaacttcatgtatggccatataggaaaccactcgagaggtttggagaaagtgagttcaaagagagagataagtgcgtaaagaacccagtaagtaagccattgttcatcttctggtaatgatcttgtctctattgctttcactgatgcatatagaggatagacgagtgtaaccaatgggagagcaaggacatcaaagttctttatgagaacttgaagaacattatcatctcctgaatttgaaggcattgttactctccaatatcttaagctttccccttttttttcctctctctctctctctttcactta

SEQ ID NO: 620 - DNA, 492 bp, Arabidopsis thaliana
taattagaagatgtctaatagcaaacatggcttcaaaggagtgatgcagaacaaaaaccatattgctgcttctgtcctcttcaaacgtcttacttcttcttggcatcaccagccttggtcttcttaacaccacggatcttcttcgccctgttcttcctctccttgatctgtttccttgatttctcaatcttggtgtcaagtccattcctgataagtctgtacttaggctcaaacttcttagcgttctcgacagtatcatagatcaaaccatatccagaagatttaccacctccaaagtgagttctgaacttgaaacagaagatagcatttgggtccttaacctcatacatcctcgccaatttctccttaagctcagcctttgaaacattggctcttccaggatgaagaacatcaataacgaattgctttctggcgagaagcctgttggtcatgaagtttctggtcctgatagtgacagctttttccgccatg

SEQ ID NO: 621 - DNA, 492 bp, Arabidopsis thaliana
tacgataaaaagtttgttacatcatcatttatcaatgtgcaagttgtgcatccttgtgttttcttatccaactttgtttttctttccttcatttatgtacaaagaacggtaaatattacgcatacaaagatacattcaccacattttctgatgatgatgatgatgatggtggtggtgatcattacatacttgctacaacagatggaatctctgcctccacttcagtttctccatccgatccctcctttgtcgtctgtggggaatctttggaattggtttcagagagataccgagccaatgctcctttaccacggagaatcttagctccagagcctcgacgcccttctccttcaactgcttcttcatccaccacaaccgcttctatcatatcgctgcctgtaccctcgtccggaatctcgtacatagagtccatgaggatgctttctagaagagctcttaagccacgagcacccgtgtttttcgttattgctt

SEQ ID NO: 622 - DNA, 492 bp, Arabidopsis thaliana
ttttttttttttttttttaaagtcaacaaaacatcatagttcttttcattcacagaatttattaaagtcaaaagatacatcatgaaacaaaaacaagatttatacaactgattttacttcttcaccgaagaacaaaacaaaaaagtgaagttggcaactttacagtaaactcaaggtttgatgtttttggtcatcttccaccagataattcaatggcatcttggttatgcatagaatcttcaccccaatcaaatctcctctgcaaccgttcaaactcatgacgtctcgtgacttccacgttttgccactcttcccatctctccgcaagcccttctccttctaacatcctcacaacttcagacatcactggtcggtcttctggtgaaccttgtgtacaaagcaaagccacttgtatcatcatctctacttcttcttttatatactctccatccaaattcttatctacgattgctcctaatctcttctctcttt

SEQ ID NO: 623 - DNA, 492 bp, Arabidopsis thaliana
cggccgccttttaactcttttctctacatatattcaaatggccaccatcgaggtatgcaaacatatattcttaaaatttcaaccaaatttatttcgttggtctaacgtttgattagcgatccaagcaaacaaatcaaaatcggaatatatgtattcacttgctttaatacagactaactatatgctaaagtttacataatgatcatgtattctgttgaaggctaactaaaacagactacatgccgtttattatatcctttattatatcaaataaaaacctcacgcagttttgaattgatctatataatctaagttttgaagtttgaaacaatggtttttgtaggttgaacaagtgactccagtagcagctgagaacatcgaggtgccaccaccaaaggctgtggagtcggaggaagtcaccaccgtctccgagtctcttccagctccggtaacagaatctcaagcgcctgtcgaagtaacaactaaagattt

SEQ ID NO: 624 - DNA, 492 bp, Arabidopsis thaliana
cggcttgattcagggcaatgggaacacattccagctaaattcccgagatctttgttggatggttacttagttgctggaactcagaagagattgtttctcgtgggaaggattggcctctacagtactctccaaagcatgagaatatgggagcttgatcacacaaaggtctcttgggtagagataagtagaatgccaccaaagtacttccgagcacttctgagactttcggctgagaggttcgagtgttttggacaagataatttgatctgctttacgtcttggaattaaggaaaaggtcttctatacaatgtggataagaaaatttggtcttggatttccggttgtgctcttcagtcatgcaacagccaagtgtgcttttatgagccaagatttgatgcatctgtcctctgaacaataagttatcgtctgtctcacatcattcttgaaaacttacaagttcgccagcaaaacatgtcagaaatatgaaatcaa

SEQ ID NO: 625 - DNA, 492 bp, Arabidopsis thaliana
  misc_feature (1)...(492): n = A,T,C or G
tccctaattcatatctttgaaactgataaagataacaaagaaatggcctctcaattgcttttacctccaaaccaattcactaaatcagtctcacctcaagttttcattactggtgattgtcaaggatttagtgacttaactctgaaaagaaaatcaaaccaagctacaagagtttcaaatggatctagcttaagagtaaaagcagctttgagatctactcacaacaaatcagtggttgagattccaaaacaatggtataatcttgttgctgatctttcagtcaagcctcctccaccgttgcatccaaagactttcgaaccgataaaacccgaagatttggctcatcttttccccaatgagttgattaaacaagaagctacacaagagaggtttattgatatccctgannaagttcttgaaatctataagctnnggcgtccaactcctctaatcagagcaaagagattagagaagcttcttcaaacaccggca

SEQ ID NO: 626 - DNA, 492 bp, Arabidopsis thaliana
tttagggctcatccccgaattatcagtgcaagtggatcgaattaaaccaaaatcaaaactaagcaacctaactaaccatatcttccgatttctcttatctctctgaagccacaaatctccagattcattcgtcgtctcggttaaggttagacggagaagaagatacaacaaatatggcggttagtatgaaacaaatgtcgttggtcgtctctgctttgggcgtcttatcctttgttttgggagttatcgccgagaacaagaagcctgcgtctgggactccaataagtggaaaaggagtagttatctgcaaatacccatctgatccaactgttgccttgggatacctttctgctgcttttctccttgcctgcactgtagcaggatacaaatccttgttcatctcttacaagggaaagtctgttcctaactctgtcttgttcaaaagcaccagcttctctgtgttcttcaacattgccttgataacatctggac

SEQ ID NO: 627 - DNA, 492 bp, Arabidopsis thaliana
acgcgtccgcccttttgatggctgtttggaaggtggctccttcccttgctgcagggtgcactgcgattctcaagccatcagagctggcatcagttacttgtttggagcttgctgatatttgtcgagaagttggtcttcctcctggggtcctcaatgttttgactggtttcggttcggaagctggtgctcctttggcatcacatcctggcgtggacaagattgcatttactggaagtttcgccacaggaagtaaggtcatgacagccgctgctcagttggtgaagcctgtttctatggaacttggtgggaagagccctctcattgtgtttgatgacgttgatcttgataaagctgctgaatgggctcttttcggttgcttctggacaaatggtcaaatctgcagtgcaacttcccgccttcttgttcacgaaagcatcgcatctgagttcatagagaagcttgtaaaatggagcaagaacattaaaatttcag

SEQ ID NO: 628 - DNA, 492 bp, Arabidopsis thaliana
ttttttttgataattgatattttatacacactttttatttaaaaacaaaacaaaaaaaaaaaagttgagaagaaaaactctaacaatatagaaatggcaaaatgggtgcaaaataaaaccacattttctttcttttttttgtattgattaaataaaaactatctcttataagttgcaaccaagctcacatcttcttcttcaagtttttgctcctcaagctctataagtctcgcaaacacaccgaccaaaggagcagtattgtacgtacaagcctccgtttgaacgtaattacccctccggtcatcaaaatcatcctggtgatccggtcctccaaccaaagccccgactaaaacactcggatttggctcggaccgtccataccaattatcatatccttgagtacatcctataaaacctttgtgctctttaaaagaagcgatagacgcgcctcgatgatgaaccctaatcgggtattttggaccgtacccgact

SEQ ID NO: 629 - DNA, 492 bp, Arabidopsis thaliana
ttctacaaaaggctgttcgataaggccatgaagaaggaaagcgttatgattcataaggaagcgtccagattcgttaacaatagcctttacaagatgtgcacgggaaggagcttttcagtggagaataatgaagtggagagaataatggaacttactgccgacttaggtgccttgtcacagaagtttttcgtgtcaaagatgtttcgtaagctgcttgagaagctcggtatctcacttttcaaaacggagataatggttgtttcacgtagatttagtgagctggttgaaaggattcttattgaatatgaagagaaaatggacgggcatcaaggcacacagtttatggatgccttgttggcagcttatcgagatgaaaatacagaatataaaatcactaggagccatatcaagtcgcttctcacggagtttttcattggagccgctgacgcctcatcaatagcaatacagtgggcaatggcagatatcataaac

SEQ ID NO: 630 - DNA, 492 bp, Arabidopsis thaliana
  misc_feature (1)...(492): n = A,T,C or G
ccacgcgtccgcaagttcggaaagctgatggtatctcaaagggaatatatcaagtggctaaatggaatgggactaaggtttctgtaaagatacttgataaggatctctacaaggattctgacactataaatgccttcaaacacgaacttactttattcgagaaggtacgtcatcctaatgttgtgcaatttgttggagctgttactcaaaatgtccccatgatgattgtgtccgagtatcatcctaaaggggaccttgggagctatcttcaaaaaaaaggtcgtctttctccagccaaagttctaagatttgccctcgatatagccaggggaatgaattatcttcacgagtgtaaaccagaaccagtaatccactgtgatctaaaacccaagtgccagaaatattatgctcgatagtggaggacatctgnnggtggcgggatttggtttgataagttttgcaaagttatcatctgataaatcaaaaatcctt

SEQ ID NO: 631 - DNA, 492 bp, Arabidopsis thaliana
gcattactctgtttttttttattctcctgtgaaaacaaacaacaactaaaaacacatacaaaggactgcagattcttttgtaccccctgtaaattgtttttcatcttttttttgcttcgaattaaaagatcattgtgatgatatatgttttgttcttgtgtttttagaatccaacaacttgagtatactgggaataagcatcggactgcatagcaattggtgctcgagtaacatgatcagggagctcgaacgcatccactagttccttggccacattccttacttgaaaactcaaatactctgtcagtttatgaatcgccttagctttgttaggcgccacataatccacgttacggtacgttcctatatctttccagattcggtccaatgcgtaaagatcacatgctagtttcagagcagcttttgcacttgggtccgggcagtttttaacagcttcgatgaacttggcaagaatgactgtttcaatgtgag

SEQ ID NO: 632 - DNA, 492 bp, Arabidopsis thaliana
atgggatataagaatcgtagacagtgtaagtgttacaacgtagataaacaaaggttgttttaagaatacaaaactatgaagacaaattacatgacaggatctgtaagaacttcttttatcttctcacgcttccttctctcatttcgctcttaagcatgtcttcacgtttcggctcttgataacacaatggatgactcaaagggatactctttttagctctccctgagacgtgaggtggtaaagctaaaactagaaccataacatcatgtttaataccagcgactcattgcagtatcttgtgctgcagacactttttgtggtatatactgagtgtttggcttcaatctacttggaccttcagcagcggtggcgcaatcttcatctcctctgttgcttttgcaaggttgagtcctctttgggtattgagacgcagcagctggatttctgaccatccttctctgttgttgttcaagagcttcaacgcctgtggct

SEQ ID NO: 633 - DNA, 492 bp, Arabidopsis thaliana
ttaagttctcatacccgctttattcattgattcattcaatttttgttcatcgttttctctagatctctcttctatatagtcctctcggaggttttccgatgaagatcgtcactgatctccttccgatctacagatcggcgtcttatacgaagagatccagaggctccggttgattcctcgtcagaagacggatcgtcgcggttgagctccgaagatcggttgaagatctgatctgatcttagatcatggaccggcctcgaggttcgtcagatctgcgttactgagcttttgatgaggtgatgaatgatgaatccgtcaattctctatggagctagagagatgagagggtgaagaagagagaagaagctgatatgtgatattgatgtgagttaagttgattgatggatgtatgagatgtttatagggacgatatagttctgcgtaaacatctttgtcatccgacctttgccatgacaggtgcgcttgcatggc

SEQ ID NO: 634 - DNA, 492 bp, Arabidopsis thaliana
ccacgcgtccgattccgtacacacctccaactaatgctgaactaccatcaactgcatcacctgcatcacctgaacaaacccagagttgcccgatttgtctgactaaccgaaaagacgtggctttcagctgtggccacatgacttgtggagattgcggatccaaaatatcaaattgcccgatctgtcgagtaaggatcacgaaccggctaaagctttacacatgatcaatggccacgaactttttttctgaccacggctttacacgtgatcaatgccaacaaactttatctctgcacataacaaatcgcttgcacatagccatctcctttgtagaatctacaatttggtttgccaagtgtttctgacaatgttccacaatcagcgtgtaccatgtaattctgtatgtactgtaaaacattaactttgcaaacaagaatgaagaagcaatgtacaaattacaaaaaaaaaaaaaaaaaaaaaaaaaaaaaaaaa

SEQ ID NO: 635 - DNA, 492 bp, Arabidopsis thaliana
tttgagcctcgtgtgccttccacgccggtctgggtataatgctccttttactccaagagtgaaatcagatggttccattactcggtcaagcccttgaagctcccatttcgtcatgttgagctcaagaactttggttatgtgtagaggtacgtctgatgggtaatcctgaccgttggatttgcatctaatccgcatgaccaccactggacacgcagtgaggaagaaaaattttattggtaacatttggattctccattcttcctcattaagcctatagtttttgggtttatccggaaacattgcttcgaaaacccttgatttgtcttccaaatattcatcaaacaaggcctgaggagactcgtggagagcgatatcggttgatattttagaggaatacttggcggattttacaggtgacaagtgacacttcactctccaccgttttgatctaacctgcccacaacttccgatcatccccgggcatgaatacac

SEQ ID NO: 636 - DNA, 492 bp, Arabidopsis thaliana
tcgagcggccgcccgggcaggtctccaccagagttatgggaatcaccggaagtctaacgccagatcagctcgattttttccactctcaagggtatttggtaatcgaatcgttcgcgagtgaggatgagattagaggcttaaggaagaggatggatgagttgcttaatcagtttgattgttccgtctcctctatcttctccaccaaaaatcagaagcacaccacagataattacttctttgagagcgctgagaaaatctccttcttctttgaagaaaaagcttttggtgatgatgggaaattgaagcaacccaaacaactctctataaacaaagttgggcatgcactgcatgagcttgacccattgtataaggatttcacatattcgtcaaagttttcaagtttggcatcatccttaggttacaagagaccagttgtcatgcagtctatgtatattttcaagcaacctggaattggaggcgaagttgtgccgc

SEQ ID NO: 637 - DNA, 492 bp, Arabidopsis thaliana
ggccgccttaatatacatatcttactaatttagctgtggttactattcataagttcatacaaaaatcatatttcatcattttagaatctttcacaaatcttcatatataattatctttatgtatgtatatgagcttcatcttgatctcgctagaatcttcaaccttcggaatctccatgaaacctttcttgactcttttttttgctgtaagaagaggttgaattctataagcagtcaacaagctcttattgtctttggattccataacttgccaaaccaacctccttcaccgccaccaccattgttctttcctctcgcgtctctcgaagcttttacactgttcagcggaactagctgtgggctgccatttcctgaagaagcttccacaattttgttcaccatctctaaaacctcactcatcttgggacgtgcctttgagttcctaaccaaacatctgttggccacaactgctagcttttgaaccgatttgat

SEQ ID NO: 638 - DNA, 492 bp, Arabidopsis thaliana
ccacgcgtccgtctcctcatctttttatcttctttgattgatccacatggcttccgctgccgcaagttccgccttttcactccttaagtccaccggcgctgttgcttcctccgccggaactcgcgcacgtgcttcccttctgccaattccctctacctctgtttccgcgcgtcctctaggcttctccgccactctagattcccgtcgtttctctctccacgttgcttccaaagttgaatcggtgcgtgggaagggaagcagaggagtggtttctatggcgaagaagagcgtcggagatctgacctcagctgatttgaaggggaagaaggttttcgtgagagctgatctcaatgtacctctcgatgataatcagactatcactgacgataccagaatccgtgccgccattccaacgatcaagtatttgattgaaaatggtgctaaagttatcctctccactcatctgggaaggccaaagggagtcaccccaaa

SEQ ID NO: 639 - DNA, 492 bp, Arabidopsis thaliana
acacaaacagagaatcaacgaagaagaaaaatggtgaaggtgatgtgggtttccgttttagctctggcggcggcgattctccttttgacggtcccggtggcagaaggggtgacgtgctcgcctatgcagctggcttcatgtgcggcggcgatgacgtcatcttcgccgccatcggaggcgtgttgcacaaagctgagagagcagcagccatgcctttgtgggtacatgaggaaccctaccctccgccaatacgttagctcccctaacgcaaggaaagtctccaacagttgcaagattccttccccaagctgttaaggaaatgttaatcatgattaattagtgacaagtttcgctgattatagtggttaatgctggtcttatcttcgtcagtactacttaaaataataaatgagtgatgatgattgatgattatcatcatcatgcttgaatgttatgttttctatcttataaaatatgaaatatactttagaa

SEQ ID NO: 640 - DNA, 492 bp, Arabidopsis thaliana
tttttttttgtgcaaaaagatactcgcaccttatttatatatagtaaaagaagctgaaacatcatagagcaatcaaataacgtaaacacaaaatgaagaaacgttacaacgacaataaagatttatttgtgatgactgacgacgatgatgaattgctcatgcctcatcaacaaccattatgtaaacaacaatgggacttctcacgttatgggtaccgtcagaccaaattagatttgcagacgaagggacttccgagtcaacgtcgctgcctgtaacagtgacactaaaagattgcttctcgttcactgtcttaaaatacagaacactaggcgtgaccttgatgctaagcttagatccgtgacctgcgactacctttgatttgtatgtagagtttggcgtgccgacgttggtcaacgttctgttgaaagtcacagagaaggtactatcggttcctgacaatttggccgacattgaaggatagttaaggtttct

SEQ ID NO: 641 - DNA, 492 bp, Arabidopsis thaliana
ttttttttttttttttttttttgggaataagagtaattttgttttgtgtctaccaaattacagcacaacacagacatattcattcttcatgctcgtgatagtgcctagagaattaacgacttgtgatcacattattagaggaaactcctaactaataaggattaggataaacaacactacatgtggtacactcaacaactcaaagattatctcctgaaaccttatccaactgttcttcggccccaagcagtgatgtagatggctggtcaaaggcgaggacatggtctgactgatggtaagaagtgttcaagcctgattctagtattgggtgacccactacaatatcaggtgtataaccagctgcacctctcaccaatcgaggcttctttgataatctctcctctcctgtgctctcatctggagacccaatgttacaccctgagtctggtgttaaaggctcccggtaagatgagagagactcgtcaactgaga

SEQ ID NO: 642 - DNA, 492 bp, Arabidopsis thaliana
gcggccgcttgcactctctctagttccaaaccctagcaattcctctgttttcaccattttcggagattatcaccttctccccgattcgccgccttgtgattacatctacgtaaagagtttctggtagaaattttccctcttttagctgcagattggcatcagattccgttctggatgtgtcggtgatcgattttccgcgtcggtgatgatagctaacggattcgagagtatggataaagaacgagtcaggaaacgtcctcgtatgacctgggacgaggccccagctgaaccagaggctaaaagggctgtgattaaaggacatggaagcgatgggaggattttgtcaccaccattaagggacgatgatcgtgatggtcattatgttttcagtttgagggacaatctcactcctagatataaaatacttagcaagatgggtgaaggcacatttggtcgggttttggaatgttgggatcgtgatacaaaagaata

SEQ ID NO: 643 - DNA, 492 bp, Arabidopsis thaliana
  misc_feature (1)...(492): n = A,T,C or G
ccgcaaagaattgaagtacaattacaattgataaatccgttgcttaaaccaagcannnaatgtaaacgcaaaaagagcnnnggtggttacatggttaggctacattggctaacaatggaggaacaaagctcgatcctttaagagtctgctcaaatatgtgacccactttcagcaatttctcctcatcaaacgctgctccgatcatttgaagaccaacaggaagacccgagggaccaccttcgactaatccacaaggtaataccattgcaggaagtccggcaagattcacattgaccgtcataatgtctccagcatacattgccagtggatcatctttcttttcaccaatcttgtatgcagcagatggagctgccggagaaataaggatatcgttctgttctaacgctgctttgaagtcttttcgaattagtgtcctcacctgttgagctcgcttgtagtaagcatcgtagtaacccgcagaaagtgcatatg

SEQ ID NO: 644 - DNA, 492 bp, Arabidopsis thaliana
ccactatctctctgctcttcctctgtctacattaatgtaattttgatcatcggattgggtgaaagaaacatcaaactcctaaaagagaagcctttaaagttttttttaatcaaaaacaaaaggaagaaaattttcctttttgttttagatggcatgaatcatcatcatcgctttgctttcttgattctctatttcgtttgatgggatttgtttttctgggaatttattcattcacctgctgccatggctaaattatctttcaaggattctcttaaagctcttgaagccgatattcaacacgctaatacactagctttagattatcctcgggagaaggatggagcgcgcgttcagatgagattatcatacagcccgactgctcaattttttctttttcttgtacaatggactgattgtaagcttgctggtttcctcggtttactcagagttcttatttatatgacttatgcagatgggaaaacaaccatgtcg

SEQ ID NO: 645 - DNA, 492 bp, Arabidopsis thaliana
aaattccctttactctcttacgtccttcatcaacatgactccaatctccacgcgccgccgtctatggccgcgcaagaaactctccttccttcttttcctcttctctccaatccacaaatcatgtctacgttgactcaatccatcccctcaacgatcacacagacgcttttcgtcttcaactctctcggctctcgccctgatcccttagcggtttcctctgctcggtccaagatcgctcagattatggattcactctcgcctgaagatgcggcgaaggagtcggagatttatgccggagttgtgcggttggatgaagtgcacgatagttacgagaagaagttgaaggatttggaggaggagctttctagggtctattctacggaggtggaatcgatgttgagaagcggcgaagaagtaaacgagaaggttcttgcggtgctcaaggcggcggaatccggcggaaccgttgagaggattgatctctcctgccaa

SEQ ID NO: 646 - DNA, 492 bp, Arabidopsis thaliana
cggccgcaccaataggttctctttagtgagtatctgactgaataaaaaataccaacatttcacgtcggtaggcttcttagtgatgcctgaattatacagaagaaattgaccgccaattttcatatatacaagaaagaaaaaaaaacaagtagaagcttcttcatcatcatttatctctttgctttggtttcgattggtttaggtctaggagaagagactgagccaccaccaccaccaagtgctgcagctgctgactccacatgtgtgagcagatactcgtagatcttcttccgtaatcgatcgattgtttctttagagacttcttgtaacccttcttcatcctctttcgatccaatctcgtctaaccaatcattcacactcttcagctgagacagcatccccgcaatctgcccattatcagacagactgagactggatgatgtaatcacgtcagcgtctaagaatctctctacgaaacccaaaaaccaatct

SEQ ID NO: 647 - DNA, 492 bp, Arabidopsis thaliana
ccaccataaaagccttcgccggagacaccatcgtcgtcaatctcaccaacaaactcaccaccgaaggccttgtcatccattggcatggaatccgtcagttcggaagtccatgggcagatggagcagcaggagttactcaatgcgcaattaaccctggagagacttttacctacaatttcactgttgaaaagccgggaacacatttctaccatggacactatggcatgcagagatcagctgggctatacggatcgttgattgtggacgtggctaaaggaaagagcgagagattgagatacgatggtgagtttaatctcttactcagtgactggtggcatgaggctattccctcccaagaactcggtctttcttccaaacctatgcgctggatcggtgaagctcagagcatattgataaatgggaggggacaattcaattgttcattagcggcgcaatttagcaacaacacatcattaccaatgtgcacgttta

SEQ ID NO: 648 - DNA, 492 bp, Arabidopsis thaliana
  misc_feature (1)...(492): n = A,T,C or G
cttaattctccggtaacattaccggcatcactgggattgctgatctggaaccgctgtgaaattttaggttttctctgagaagacaggcaagtttaacgatggcggcgaagacggccagatcaaaagctacgccgacgaaggaaaatggtgtcagagtcgaggaaggattgagtctgttcaagtctgataagttcgatgctgatgcttatgtgcaatccaaatgttctatcaacgagaaggatataaagcagttatgctcgtatctattggatttgaagagagcatctgctgaagaaatgcggcgaagtgtttatgctaattatccagcctttatacgcacatctaaagagatatcagatcttgagggggagctatcatctatcagaaatcttctctccactcaggcgactctaatccatggcttngcanntggagttaacattgatgacgataaagtttctgatgaatctcttgcgaatggtttattgaatt

SEQ ID NO: 649 - DNA, 492 bp, Arabidopsis thaliana
gctagacaacagggtttctatgtggggaacggagtagataccaatgctcttagtttctcagataacatgagctcagggattgttgcatttgagatggaatatggacattgggtggaagaacagaacaggcaaatatgtgaactaagaacggttttacatggacaagttagtgatatagagcttcgttctctagtcgagaatgccatgaaacattactttcaactcttccgaatgaagtcagccgctgcaaaaatcgatgttttctatgtcatgtccggaatgtggaaaacttcagcagagcggtttttcttgtggataggcggatttagaccctcagagcttctcaaggttctgttaccgcattttgatcctttgacggatcaacaacttttggatgtatgtaatctgaggcaatcatgtcaacaagcagaagatgcgttatcccaaggtatggagaaactgcaacatacattagcagagagtgtagcagcc

SEQ ID NO: 650 - DNA, 491 bp, Arabidopsis thaliana
acaacgcggctatgaagcagtggatgaaattccaaagcatccgcaaaaccattcaacttgggaagaagttaagagtgagcgggagcatatcaagaacagctacgcagaggttgaaatgaaagagcctgtgaatctacccacgacaataccaatcccacagcctgagctgaaagcctttgtgggaaaagagaagaatgaactcatattgccagcttcaaaatgggcgagagacgatgatgaagctgatgatgaacaaaagaggagctcctcttcaggaagtgacaatactggtgggataactttcaaggccgatggcgaggatctcaagggaaatgattgtgtccgtgcccaacctgacaacggaatggacgaggaacaaagacaaaagcggagacgcatagaagttgctttgatagagtatcgtgaaactcttgaggaacaggggatgaaaaaccccgaagagatagagagaaaagtagaaataaacagaa

SEQ ID NO: 651 - DNA, 491 bp, Arabidopsis thaliana
aaagccttaaatccacttacaaatcataatcatacactgttattgtgattaaagattgttcacttaaatgtatgtttctctatcagacactgagaaaacactaaagattgttcttgtgatttcatcagatagatattacaacataaagcagataactctaagacgacgacttacatgattttcgataaaacactcgtctcagaagttatacttccttttgacagagacatggtcatcttcatcatcctcctcttcttcctcttcttcttcctcttctacttcttcttcctcttcttgcacaacatcatcttccgcggtattaaccctctcgcactcatcgatccattcgctataaatgtctatagcttcagtcaaagctgtgatagtagtactaaagctttcttcacagattctacctaaggaagcttctgagggagtaattatataatgtagataaaaagcttctgatgcattgtgaaatcttcatatct

SEQ ID NO: 652 - DNA, 491 bp, Arabidopsis thaliana
cttctctcctctctcttcacattattatattctctctgtttcttccaatccaatccaatctctctctctctctctctctcagaaactaaactgaaatattgcagagttttgaatacacggccatgaaccaatcaccatctcttatcgaacagggtatttctcaacagcatttgaagactttgtcttgtgccaatgttcttactttggcttaccagagtcttggagtgatctatggtgatcttagtacatcgccactctatgtttataagaccactttctctgggaaactaagtcttcatgaagacgatgaagagatctttggagtgttctctttcatcttctggacatttacactcattgctctttttaaatacgttttcattgttctctcagcagatgacaatggagaaggtggaacatttgcgttgtactcgcttctttgtagatatgccaagctaagcattttaccaaatcatcaagaaatggatgag

SEQ ID NO: 653 - DNA, 491 bp, Arabidopsis thaliana
catcatcatcatcacttgagatgaagaagaagttggaaattgaccaaaaatttacgagtcaaaacgaagaaaacaccaaaaaggaagaggagaagaagaaagagaccaacaataacaatctttctaacatgaagcataagaagacgagttcacacgtatgggactgtgggagcactctctacgactcgttcgagctcaactcgttcaaacgtcaactcgactcagccatctctgcttcctccgccagaactatgtccatgtctcacctccctgaccgccgtatcccttctctcagctcactttcgccggagtactctcctcctcttcctcctccaccgacaacttcttcttcctcctcctccggtggaaagaaacactcgaacaagatctctcgttctctacagagattcttgaagtcaatgttcaaacctaaacagcaccaaagcttaaccactccttcttcgccggtctacaaggcggtgggtcacggc

SEQ ID NO: 654 - DNA, 491 bp, Arabidopsis thaliana
ccacgcgtccgagaagatgcatttctcatatgtgatctggttgcttctttaactcccggatttgtaggtgctgatctcgccaatattgtcaatgaagctgcattgcttgctgctcgtagaggcggagaagcggtggcacgggaagatataatggaagctatagagagagcgaagttcgggatcaatgataaggaagcgaggccaaggacgttaggaaatgaactcagcaagatgttcccatggatgccatctttggctagaagaaacggaccagatcaagacggtttacaaggaccgttaggttatcaaactctcagctaaaccaaaccaagacagaccggttagagagcaaatccattgataccaagtttctttgtatctgaaatttttggaaatgtacgtttttttgtgtgtttacattgcaaagtcaattgctttttggttcgtagtaccttccaatttgacaaatctcttagataaaaaaaaaaaaa

SEQ ID NO: 655 - DNA, 491 bp, Arabidopsis thaliana
agaaagccaaatccgtacaagtataagcctcacaacaactcaagaaatcagtcttggttgttcagaattctgatgagaaatacaaattctccctgagactaattattcttataatgtaacttggatagtataagaagaaaacatcatatagacgaaaaggtgaatggtttgagtcgttgagcttgacccttcttatgttatgacggtgggggctgatcggcctgtgaactcttccatcttcgacagctttagagctaagtcaaccagaggagacaaagcttcctgggattctcggccggtttttgaagcatccttttcgtactgttcgatgtaaagccggatggttgctccttctgagccagttccagagagacggaaaacaagtcgtgatccgtcttcaaacaagtaacggattccctggtgcttcgaaatggatccatcaactggatctttgtactcgaattcatcagcactggcgacgcttgccacgt

SEQ ID NO: 656 - DNA, 491 bp, Arabidopsis thaliana
ttaacgttcatatgcttctttttcttcttcaagaaaccaaaggattcacgagttaacttcgatttgcctccgagccctccttctctaccaatcattggtcatgttcaccttctcctctctactctaacccacaagtcattacagaaactctcctccaggacacaagacgtgaacatctcctctcgcggtgtcaccgcggttgatgagtccctcgtgtttggatcttccagcttcgtcactgctccttacggagattactggaagttcatgaagaagcttactgtcatgaagcttctcggaccgcaggcacaagagcagtcacgagacatccgtgcagatgacataaagcggttttgcaggaatctgctcgataaagcaaggaagaaggagagcgttgagattggtaaagaagcaatgaatctcatgaacaacattttgtgcaagatgagcatgggaaggagtttttcagaggagaatgttttgttgcgcag

SEQ ID NO: 657 - DNA, 491 bp, Arabidopsis thaliana
gcatcagtgagttgtggttgttgttggtagccgcggaagaggaaggattggaaccattaggaggtggaggtgagtgggtgaggtctaatgtgacggttggaaacggcgcggaggctgagattgttgccatgcttgtggagcaaggaagaacagccctagctagtaaatttgtagggttcatcatcccgtcgtgactagacattgacccggatagcaacatgttagccgccgccgtggtggtagaagccatggctaccgcggctggcggcaacggatggttatggtttccctcgtaggttgtaatcagaattgatctgtcttccgcgcaacgttgaacttgtttgcgaacgggacagcccgtggccatcgtgcagcggtaatatgcccgcggacaaggattccctttggccatcttctggccatattttctccattgacatccatcgcttatcatcggagcttccgatcgggcacgaacggagacacgggct

SEQ ID NO: 658 - DNA, 491 bp, Arabidopsis thaliana
tttttttttttttttgttttttttacttaagtgtaatctattacatagatcaaacatgaagacttgactacaaaatccatcaaacggtttggccaaagaactgagtgtacagattcataaccagacgagacatattgaaacagaggtttcacataaccagagacaacaaacaaaagcaacttcaatggttaaggatacttaagggggatacttgagggaattaataagcttttcaagacccgatcttaatgccattttccacggattcttgcgatgctgaaggaggaggaggaggaggagcaagatggcctttctcttgtaagctcttgactgtgtcgtagaggctttgcttggtggaagtgaactctaagcctaagtccttaatcttctggttagtgaatttgtatggcttggctctagggttcttctcgtccttgcacttggtcggaagaggatactccgggaatagcttagccagaatctcaacaact

SEQ ID NO: 659 - DNA, 491 bp, Arabidopsis thaliana
ggccgcccgggcaggtactgtgagatcattccacagacagcgatacgcccgtgcatgttcatgttcacaagcactgcatctagcattttgcctcctacattctcaaagtatatgtcaatgccattagggaaacacctttttagggcagcagtaaggtcagattcttccttgtagttaaatgcatcatcaaacccaaacttggtcttcagaagatcaaccttctctttacttccagcgcttccaacaacataacagcccatcatcttagcaagttgtcccacaagctgaccaacagcaccagatgcagctgacacataaactgtctctccttcctttggagaacaaacttcataaaacccagcataggcagtcataccaggcatacctaaaagtccagtgtaataagataatggaacatcagtatgttggatcttgaaatgcgcgtgagtcattggagtgataacactgtacctgcccgggcggccgctcga

SEQ ID NO: 660 - DNA, 491 bp, Arabidopsis thaliana
cttcctacatttccccaagccttaccttgctcgtcaaccaaaacttcttcctccttggctaccttccgatctcctttcttaagattcaatggtgccacttccttaatcccctcctctatctccatcacttcacgtggcacatcctccccgaccatcatcccacgtgctgccgcctcagaatccgactctaacgaagccctagccaacacaaccttccacggcctctgctatgtcttgaaagacaacatagacaccgaccagatcatcccagcaggagccgcttgcaccttcccatcgaaccagcaagagcgtgatgagatcgccgctcacgctctctctggtctaccagacttccacaaaacacggttcattgagccaggagagaacagatcaaagtactcaatcataatcggcggcgaaaactttggttgcggatcgtcacgtgaacatgctccggtctgtcttggagcagctggagctaaagccatagt

SEQ ID NO: 661 - DNA, 491 bp, Arabidopsis thaliana
  misc_feature (1)...(491): n = A,T,C or G
tttttttttttttttttttttttttatacaaaaaaaaaatctatcaacgggcttcttcacattgttgtgcgaaacagagggtaaaacccgaaaaaaggaaagaaaaaaagagagtaacaagtgagtgaaacctcttggtgttttcaggatgaggttgagcagtccggggggattgtttcggacttgatcacccgggtattgtaagaaccacagctaccacatttatggtacaaccaatggaaccgtgtagttcctttgcgttcacaatcattacatagaatgtcctgacagcgatttttgtattcctctggaagttcttctgcagctaacagtgcatcaagcataccaaaataaacagccatatctcctaatgattttccacagattggacatgtgtagtgactgnnngnnnaagcctggaagcaagctgagtgnatgtagtgaccacatggtaaggctctaactgcttcactcgatgtgaaaagaaattc

SEQ ID NO: 662 - DNA, 491 bp, Arabidopsis thaliana
  misc_feature (1)...(491): n = A,T,C or G
ttcttttgattattttacacaaatggttgatcatttaagaaagacacatttactgttagtgtcataagtttgacaacgatgaaggaaactcaaatgccttgcccgtcgtatgccttccatctttctatcaccaccttgtactcttcatcccttctcctcacctcaaccatgggatttcttccgcgannnacatatcaacactcttttcagtttgatgtgcaatccaataatctctttctctcatctcgatcaaaaaataaaaagtcggtggagcttttctctcgagaatactcttctgactccttctcgccctcgcttcttcatctccaagcgttacagtctcaataccaccaatcaagtctgaaagagtaggattctttatgatgttctgtagctgctctccatgagcagtgccaattagcatcactcctctttcagcaatggaacgacaagcaagtgcttcagcttctgtgccaatctcatcaacgatg

SEQ ID NO: 663 - DNA, 491 bp, Arabidopsis thaliana
  misc_feature (1)...(491): n = A,T,C or G
taatcaaattcaacttaaaatatttcagtcttgttcaaaagcaagcaatgtagaaaacacactactgaaaaagcaacagatcatcaagtttcatagacccaagggtgaacgctgctctgccagttgacaggtccatcagggaaccacaaagcaatctcctttctggcgctctcgacagagtcactaccgtggatcacattccttccaatgtcaatagcaaagtccccacggatagttccaggctcagaagctgctgggttggtagctccaatgatctttcttccggtcaagacaacattctttccttcccagatcatagcaacaacagggccggatacaatgtagtcaacaagtccactgaagaaagactttgaagataagtcttcgtagtgcttctcagcaaaaganntctctacactgatcaacttcagacctttcaaagtgaaacccttcttctcaaatctgcagatgacttcaccgatgagtcctct

SEQ ID NO: 664 - DNA, 491 bp, Arabidopsis thaliana
  misc_feature (1)...(491): n = A,T,C or G
ttaggttcaaaacaaaggccactgcttattcctcaatatgcttcaagttcaagcgnngatgnnnngcggaccagtcttcgtagaagcgtctataccattttcaccagtcctgattccggttatccacgtctttctcacgttgtcgccaccaatatccatcttgattgttagccgtttagttgctttcatgaaatcactgaaaggttcgtctccaatacgtttgataacaccatttgcatcccggtacacaacatgagtcaacaaatccgacctctcttctatatgaaacatctcagccaatttccggtacaattcttggtacgagccaataaccgagagatcgagtgtgcgtccaacatcctcagattccatgaaaactttacaatgacccgtctcaagtccttgcaaactataattccatgttaacccacgagccactaaacctttctcctcctccgcttccgcctcttcttccaaaaaccgttttcggt

SEQ ID NO: 665 - DNA, 491 bp, Arabidopsis thaliana
  misc_feature (1)...(491): n = A,T,C or G
ttaaaaaaaaaaaactaataatttgaaaaatgataaacaaagtaaaattcattaagcaaatggcctatcaacgcatggacacaacaaatatttagttcacatatatatattttttcctacccaatatacccctattaatagtagaacagtaccagaaagccactggcaaagataggcatatgtactaatgtacaggctttgtttttgaaagcacaatactgatctcctaatctgaaaatgtcctagcgatcgatcgggtatagggaactttgactacttcaatctgacctttccaacaagaacatgaagttggagttttggcggatcannngaggaggatcaacctctgcaacctctacgttttgcatcgatttggagatatcgtcaagcgagaatgggatgctcgaatcgtcgtctagtaaaaatgaattgctgatcgcgctctttgatacatctgacacctctgcccgcatggttgctcggacgcgtgg

SEQ ID NO: 666 - DNA, 491 bp, Arabidopsis thaliana
gtgcccccaatgtaaagccagcatcaaagaaacactccgaattcgaacatcagaatcaatttgtcaggaaagagattgatccagagacttcaaagtatttctctgagattgccaatctctttgatagtaatgaagttgaattagaggaacgttcagtaatatgtggaaatgcccttgaagaaacaagagggagggagtatgaaattgctacagactatatcataagtcatgtcttgcaaactctacttgagggatgtgaacttgaccaactctgcagtttcatacgaaattctgctagtgtgttcccagccattgcaatggatagatctggttctcatgtcgcagagtctgctctcaaatccttggccacacatctagaaaatccagacgcctattctgttattgaggaggctttgcattctatatgcaaggtgattgtggataatcctcttgatatgatgtgcaactgctatggttcgcatgtactacga

SEQ ID NO: 667 - DNA, 491 bp, Arabidopsis thaliana
ttggattcgttaaacggagaagtggatttggtacgagtctttaggtttccttcttcaccaaaagctctatatagagagaatctgcgagctctttttggtaggaaattagggttcgtgttgcttggtaaatatagaatcaatgacggaggttgttctgcatatatacgatgtgacgaacagtggatcggagaagactaacaacaccattgttcagatcaataggttcttcaaagacgggatcggtcttggcggtatattccacagcgctattcaggtatatggaaacgatgaatggtcttacgggtattgtgaactaggaactggtgtattcagctgcccgagtggaaagaatccaatgtacacataccgtgagaaaatcgtccttggcaaaacagattgcacaatcttcatggtgaatcagatgttgcgtgaactcagcagggaatggcctggacacacttatgatttgttgtcaaaaaattgcaatcact

SEQ ID NO: 668 - DNA, 491 bp, Arabidopsis thaliana
gagacatggattctgactgatgaagggaagaaatatgcggcagaagggtcaccagaggttcaacttttcttagctgttcctgaagaaggcagcatatcaaaagatgagctccagaaaaagttagctcctgcagtcttcaagatcggctgttctcaagctggaaaaaacaagtgggtggaaatgggaaagcaagtctcgaggaaggttaaagatgtagaagataaagtgaaaggccagcttttacaaatacaacaagggaaggaatttgacaaagaaagtatcaattctcttaaagccagaaaactcatagtaccacagatatggaaggggtattccgtaaagaaaggtcctaattatgctcccgagagaaagaaagtggctaccgatttgactcgagaaaatcttcaaaactggaaagagttagagtttaaggagtataacttcaaagctaaaggagcgcctgttgacgctgggcatcttcacgctcttct

SEQ ID NO: 669 - DNA, 491 bp, Arabidopsis thaliana
  misc_feature (1)...(491): n = A,T,C or G
ccacgcgtccgagtccacagccattgttggtccaagcgggtcaggtaaatccactataattggcttgatagagcggttctacgacccgttaaagggtatagtgaaaatcgatggtcgcgatataaggtcgtatcatctgagatcacttcgtcgacacatagctttggttagccaagagccaacattgtttgctgggacaatccgagagaacatcatatatggaggagtgtcagatnnaatagacgaagcagagatcatcgaggcggcgaaagcagcgaatgctcatgatttcatcacgtcattaacggaagggtatgacacatactgtggagacagaggagtacagttgtctggtggtcaaaaacagaggatcgcgatagctagagcggttttgaaaaacccgtcagtgttgcttctagacgaagcgacaagcgctttggacagccagtcggaacgtgtggtgcaagatgctctcgagcgtgttatggtag

SEQ ID NO: 670 - DNA, 490 bp, Arabidopsis thaliana
  misc_feature (1)...(490): n = A,T,C or G
ctcttcttctttttctcctcatcctcctctatcttcgaattcatccgggagaagaaacttgaagacttttcgttacgcctttcgcgccaaagcctctgccaaaatccctatgcctccgataaatccaaaggatcctttcctctccacgctcgcttctattgccgcgaattctccggaaaagcttctcaatcggccggttaacgctgatgtgccgccatatcttgacatctttgactcccctcagctcatgtcttctcctgcacaggttgaaagatcagtggcttataacgagcaccgaccgagaactcctccaccggacttgccatctatgcttcttgacgggagaattgtttacattggaatgcctcttgtgccggcagtgactgagctagttgtcgctgagctaatgtatcttcagtggctggatcccaannaacccatttacatttacatcaactccacagggaccactcgtgatgatggagagacg

SEQ ID NO: 671 - DNA, 490 bp, Arabidopsis thaliana
cataaatcaataatttcgtagaaccatatccatctatcgtcacaaatatatacacacttataatacaatttcataaagtacaaggttcccttatttgatgagagtggagcaaaacacaaactaaaaaatattatgtgccacgctcaaaagtgtatactttggtctatctcattgcacacataccaatatgttccatatccttcttgttctcctcatgattttcccaatcaactgagcgatgcacgatccgatcaaattcgacgacggaattaggctcgttctcgctggagaaatcccggcgaacgaacctccggtttcaggagctttctttctcatgtagaagcttctactgcctaattctccaattatttctcttttctccaaacactggatgctgaaatgtgactgatgcaattcaaaggcagaatctcgatcgagttttggagttcttccttctttacagtacttgtcaacgacaattgtgatcgtt

SEQ ID NO: 672 - DNA, 490 bp, Arabidopsis thaliana
  misc_feature (1)...(490): n = A,T,C or G
ggccgcttttcatttgtcaactattcatacgattttttgaaacttgaaagtttcaaaattttcctacaaaagtctagacatattacgaagaacaaactctttcccgattctcagcacaactcagcaacgtcatcaaacactaacattaaacaattattgaaaaagaagtagaaaaaaaaaagaaaacacaaaagaaaaggaaaaaagagaaaaatagcagatcctcaacagagaaaatgaaaagactaaggtggataacatgagcctgcttctcacattaccttaatacctctctccaaatcggaagaacagagcaccggttccattgttgtgatctacagcatactcagctcggaccaaaccgagtttcacacctgcaccataggatgaaccctgacccgttctcctgtacactgctgtagggtttnnnttcacatcctttgagcttcctaaatcatttccatgctcaacaaaagcgtagacatgtgtg

SEQ ID NO: 673 - DNA, 490 bp, Arabidopsis thaliana
gacaattatgattgccttgcaaaccttggagttgcttatcttcaaagtggcgatatggagctttcagcaaaatgttttcaagatttggtactgaaagaccataaccatcctgccgctttgataaattatgctgccgagcttctctgcaaacacagttcaactgttgctggtgccggggctaatggtggtgctgatgcttctgaagatcagaaggcacctatgaatgtcgcaaaggaatgtctcttggctgctctaagatcagatccaaagtctgcccatgcgtgggtgaatcttgctaattcatactatatgatgggtgatcacagaagctcgagcaaatgtttggagaaggcagccaagcttgatcccaactgtatggctactagatttgctgttgctgtccaacgaatcaaagatgcagaaaggtctcaggatgcaagcgaccagctttcatgggctggcaacgagatggcttcagtgataagagaag

SEQ ID NO: 674 - DNA, 490 bp, Arabidopsis thaliana
aaaacaaaacaaaaaacagagagatggaaaacggaaactcctccagcgacaacaaatcttcacataaaccgatccgatgcaaagcggcggttagtaggaaggctggagagccgttggtgatggaagaaatcatggtggcgccgccgcagcctttcgaggttcggattcgaatcatctgcaccgcgttatgtcacagtgacgtcactttctggaaactccaagttcctccagcctgctttccgaggatactaggccacgaggcaataggcgtagtggaaagtgttggtgaaaatgtgaaggaagtggtagaaggagacaccgtactaccaacgttcatgcctgactgtggtgactgtgttgattgcaaatctcacaaaagcaacttatgtagcaaatttcctttcaaggtatccccttggatgccaagatacgataattccagcagattcaccgacctcaatggcgaaactctctttcatttcttgaacgt

SEQ ID NO: 675 - DNA, 490 bp, Arabidopsis thaliana
  misc_feature (1)...(490): n = A,T,C or G
cgctgaagtccccacacaagcaagcttcgatggatcccaagaacctaaatcgtcaccaagtaccaaatttcttgaacccaccaccaccaccgcgaaatcagggtttggtagatgatgatgctgcttctgctgttgtttccgacgagaatcgcaaaccaacaactgagattaaagatttccagatcgtggtctctgcttccgacaaagaaccaaacaagaagagtcagaatcannaccagcttggtcctaagagaagctctaacaaagacagacacactaaagtcgaaggtagaggtcgacgaattcggatgcctgctctttgtgctgctaggatttttcaattgactagagaattgggtcataaatctgatggtgaaactatccagtggctgcttcaacaagctgagccatcgattattgcagctactggttcaggaactataccggcctctgctttagcttcttcagctgcaacctctaaccatcatca

SEQ ID NO: 676 - DNA, 490 bp, Arabidopsis thaliana
  misc_feature (1)...(490): n = A,T,C or G
cggataattctttacagtgtatgaggtaactgcacatacttttgttttctttatgtgtaactgtgggctacctgatgcctagtcttcacgtgcgtggtacttcattagttccatctttttgcttactactttattttgggtaatgttcaggcgaaaaagtcgttctatttctcctaggcgccatcgaagtcgatctgttactcctaagagacgttctccaaccccaaaacgttacaaaagacaaaagagtaggagttcaactccatctcctgcaaaaagatctcccgccgcaacccttgagtcagccaaaaataggaatggagaaaaacttaaaagagaagaggaagaacgaaaaangcgacagcgtgaagcagaactgaagctaatagaggaagaaactgtgaaacgggttgaagaagctattnnnaagnnggtcgaagaaagcttacagtctgagaaaatcaaaatggaaattctaacgctgttggag

SEQ ID NO: 677 - DNA, 490 bp, Arabidopsis thaliana
cggccgccttagcttctcaaatcctcgatctcttttgtatcgtgattcattaaccacttcatgataattataatcttccttctcttctgacgattgaattacatcttcttctgatagctgttctgatttttttctgtatacaaagtaaattcaaagtgttttattggtgtcctgcagtggacaaacatcggtattttaatctcctctcgataatgaagtgtttcttgttctctggtggggataagagaggggaacagaagacccctatttcggtttcattgacctctatcttctctgaccgcgaaataaaccgaagcgggtcagagttcaactctcgtgatgtctctgggacgagcacagaatcatccatggggaggaagaactcgtaccctccggtgtctactagagcaagtaatctcagagagttcagcattactgatctcaagtctgcaacaaagaactttagccgatctgttatgattggagaagg

SEQ ID NO: 678 - DNA, 490 bp, Arabidopsis thaliana
cactgctggggagtggaagcacactgcgggaaattggtctggtgacgctaacgataaaggtatccagaccagtgaagactacagattctacgccatttcagctgagttccctgaattcagtaacaaggacaagaccttagtcttccaattctcagtcaagcacgagcaaaagcttgactgcggtggtggctacatgaagctactaagtggtgatgttgaccaaaagaaatttggtggagacacaccatacagtatcatgtttggtcctgatatctgtggctacagcacaaagaaagtgcatgctatccttacctataatgaagccaaccacctgatcaagaaagatgttccatgtgaaactgaccagctcacccatgtgtacacatttatcctccgcccagatgctacttacagcattctcatcgacaatgttgagaaacaaactggtagcctttactctgactgggatcttctcccacccaagaagatc

SEQ ID NO: 679 - DNA, 490 bp, Arabidopsis thaliana
aacaacaacaaacctctccaagccgtagccatgaccaccactactgttactccctccagctatacgctcgttaccatctccggtgaaatcccaaatctcagtttcaagatctacgaatcaaacgcagattcttggagcaaagaccaagaactggaatcagtcaagaacaatgattcatcattacatgatgattatgatactgacagtggcacagtctactttcttagcaaacaaggaaacgttgtcgtggcgagtaacaatcttcagagaagtccgtcgaagcaatactcttccgttattaccgttacagatgaagccgaaatcgtctattttctcagctcttacggaacaattgtagcttgtgatctcactaaacgatgcttcaccgagctaccaaagcttcttcctccgttcctagagtactccatcgacttggtggaatgtgaaggaacaatgtatgtgattcttctctctgagttctttgaaagcg

SEQ ID NO: 680 - DNA, 490 bp, Arabidopsis thaliana
cacgcgtccgattgaaaacacgagcttcctaaaccctagcagcagagtcttccgtaaacccagctctcttagctctcacgcctcgtcaattgttgacctgtaggatagatatgggcaacgagagcaaaacctcggctttggaatcggagcagaaggctcttcttctccgttcggtagctcaatacttggaacgatgtggtttttccaaatgcttcaagaaattgctctccgaagctgaaatcgagaagaaggaattgaacactagtttacctgatttagaggaaattttcagcgagtttttgaacaagagagatcatgaagctgcagctaatggaaataccgaggcgaatgtagtggaagctgtagagaatgtaaagaaggataagaagaagaagaagaacaaggaaacaaaggtggaggtaactgaggaagagaaggtcaaagagactgatgctgtgattgaagatggagttaaggagaagaagaagaa

SEQ ID NO: 681 - DNA, 490 bp, Arabidopsis thaliana
  misc_feature (1)...(490): n = A,T,C or G
tgaaattactttttgtatattattgtgaaaaaaaatatcgatcgtgaatacaacgaacacattatatttccaaatccaagactttaaagaaccaacattatatacaaacaaatccctcaatacttatttagaatctatcataacactaggctttttgacgacttaacgttttgactttgaaatatcttggctttagactagaatatcaagaaatcctccttgatgttatattgcatcttctccaaattcggctgaaccgcaaactgaatcatcggtggtggtccgcaagccatggcaagggctgagccatctaatccatcagggatatgttctcgcataatcgcctcggaaataaacccggtactgtatgcccaaccttccttagctgattccactacgtaccaaacctttaancggtccgggtattgctctgcccaaccatccagttcctcccttaggagaatatcttcctcggtccggttagcataaa

SEQ ID NO: 682 - DNA, 490 bp, Arabidopsis thaliana
cttttttttttttttttaagccaaattgataacttagtaatttaaccccttataatcttcaaccaaataaacatctttttgttttttcagctaacaaagaacaccgactctcacagatcactacattacaagtttccaaatcatttatgtgatcttacatctactgagaaagctgccaatctcttttctcaagcggctaaaagataattacaaatgctagaaccgtcgccgccgtttcccaaccctttgattcggggatgaaccggtataaggagttgaagaagttatgtccggaacaaacacagagtggtggtgaaaatgcttaggccagtttagaccagacgctgtaggtggagactgaatctgtggaaccgcccatgatgtctcacctcccaagcagttattgttatcttctccatcttcttctgcagatctcatcatcgaagaactgtctgaatctcctcgtctactagtatccgccttagatgat

SEQ ID NO: 683 - DNA, 490 bp, Arabidopsis thaliana
tattataactatctcgagtttcaaatatggtttctgttcacaaagagggataaattaaacacagcacgagtaatgcttttagtgtaatgcacacacaatattggtttttttttttaagttagtttactgatctcttcacaacagagactttggatatatctccaccaagttcttcaaaaagtactaacaagttcccttttggcttcaaccacgaacgcggaacatgataccatctttgtgtcggctcgccacaaccagactggcatttgttctgcctgtatgttccagcgtagttacaacttccgcagtctcctttggcaaatgccatccagtatctccctatgctttgcccgtttatccaagcttgccctttccccatactctttagatccaaagccagcggctcgttccctctaggcgcgtcaaaataggccttgtaccatgtcaaaggttgtttgttttgcttagccaatgagcctttgatccaatc

SEQ ID NO: 684 - DNA, 490 bp, Arabidopsis thaliana
ctatctggtggagcgacaccaaaaacaacaaagccttctcattttcacactttgggtaatcggagaatcacaaaaaaatgggaaccctaggacgagcaatttacactgtgggtaactggattcgtggaactggtcaagctcttgatcgcgttggttctcttcttcaaggaagtcaccgtatcgaggaacatctgtcgaggcatcggacgttgatgaatgtgtttgataaatcaccattggtggataaagatgtgtttgtggctccgagtgcttctgttattggtgatgttcagatcggaaaaggctcgtcgatttggtatggctgtgttcttcgaggtgatgtgaataacatcagtgttggatctgggacgaatatccaagataatacgcttgtacatgttgcaaagaccaacataagtggcaaggttctacctactctgattggggacaatgtaacagtaggtcacagtgctgtcattcatgggtgtac

SEQ ID NO: 685 - DNA, 490 bp, Arabidopsis thaliana
cccattggcccaaaaacaactcatttctgggggcctatcgctaattggggttttgttgctgctggtttggtggatatgcaaaagccccctgaaatgatttctggaaacatgtcgtcagctatgtgcgtttactctgcattgttcatgaggtttgcctggatggtgcaaccacgtaactatttgctacttgcgtgccatgcatcaaacgagactgtacaactctatcagctctcacgttgggctagagcccaggggtatttatcctccaagaaagaagaggagaaaccatctcagtaaaccaaaatgaggaaaggtttcttcaacgctgcttcagaatttgttcgtgggaattactgaatccatccatttgattttctttcgaaacgtgttttgtattgtgtccccaagctatggttgctttacttgttggatcattcactaacattatatcctttgttttcataagtaaccgcttgtaataaaatttggg

SEQ ID NO: 686 - DNA, 490 bp, Arabidopsis thaliana
attagtcttttagcataaaaactgaaacaacaaaaatccaaaatcccatataaaaaacaaactgaaaaaaccaataaaatcactgctttctactacagattattactctagcttcctctttcttctcctccattctcttctaagctaatctccttcttctcctcagtggacgagaatctgcactgtcaacatcagagacccttgaactgttctcatgtcttctaacagacgaagaagtcgatacagtcaacattgaattaatctcagccgccgtttcaacttgactctccgagtttatcacacctactatgcttgagaacgaatccctgtcttcaacaccaacaggaggactgctgttttgttcttggttcctccccaatgcatgtgttatcaaataagtatccgctaatctttcagcagagctcaaagtaaacgacgacaccctcccatacatctgtgcccatcgtctctgggttgcccggacgcgtgg

SEQ ID NO: 687 - DNA, 490 bp, Arabidopsis thaliana
tttttttttttttttttttttttttttttttttttttttttttttaaaggaaagatcacaatatatatattttaacaagagaaactacataggatttgtacaaaaatgaaatgacaaaatgaaattgaactcaacaaactagacactacaagatcaccaatcttatctcactccaataaaccacagaaaattctaaaaagtgaatgaaaatatttctgtgggaaatgagaagatagaagattaagtttaggatccatggaagtttctcgttgagccaaagatggaagcaaaagaattagcaaaaccaagcaagatcccaactttgacttgccctctcttcgggatcggacggctactgtgttctctaccaccttttctagttccatctccaccgttgatcatgctgactttacctcttccttccattttctgctcttcgaagtcaaagtcttgtggaaagtagagaagaagaagaagtgcggacgcgtgg

SEQ ID NO: 688 - DNA, 490 bp, Arabidopsis thaliana
tcgagcggccgcccgggcaggttatcagttagttttaaagatgagttcttcagagagtgtggaaaacgagtgcatgtgttgggctgcaagagatccatctggtcttctttctcctcatactatcactcgcaggtctgttacaactgacgatgtttcactcacaatcactcattgtggagtgtgttacgctgatgttatctggagtagaaaccaacatggagactccaagtaccctttggttcctgggcatgagattgctggaatagtgactaaggttgggcctaatgttcaacgattcaaagttggagaccatgttggtgttggaacgtatgttaactcctgcagggagtgtgaatattgtaatgaaggacaagaagttaattgtgcgaaaggagtttttactttcaatggcattgatcatgatggctctgttactaaaggaggctactctagtcacattgttgttcatgaaaggtacctcggccgcgac

SEQ ID NO: 689 - DNA, 490 bp, Arabidopsis thaliana
  misc_feature (1)...(490): n = A,T,C or G
gaagtagccattgttcggaacagaacagggagctcctaaaggctaatatctatagaatctgcttttcattacagacattgaagtactcaaacactactcttgctgtcagggattacttgcagaaggatacctgtaaagatttgtgtctgagccgttcaacggctgtgcatagttcataacgggtgagtttggccacggtgtatatgaagccacgttatgagtaaagggactcaaagcagggttaagcggatgcccatagtttaggttggcttgatgacctcttggcatatgcgggaaaaacccatcgtgaaacggaatatggattggcattggactgaagctttggccagacggcataaccctaacgtacctgtaggccggannnangacatacctgtcatagctcctgtcataatccgggtcatatcgatctttctctctatctctgataatggctactcgagaagtccgtccagagtctcgagtaaca

SEQ ID NO: 690 - DNA, 490 bp, Arabidopsis thaliana
  misc_feature (1)...(490): n = A,T,C or G
tctagagcggccgccctttttttttttttttttttttggtctcaaaagttacatctttttttctatgcaattcttataaattcattttgccaagtcactgagattttnctttgtatagatgaaataaaccaaataaggatcctttggttaaatatattacaatgaagaagagccagagatgttgctctgcaactgaatagtatcttgagtagcaacatcaattgtaccattgaggaaaccagtgtaccaagaagcagagagctttggagtcctcttgcgaccaggatcgctgaaattcacatagtacattccgaagctggtcgtatatccactcagtaactcatacaaatcaatcatcgaccatacaaagtaacctctcgtgtccgatccattcttgatggcattgagcatagcaccaatgtaagcttgaatgaattcaattctttgtgtgtcttgtaatgtcgagtcgcgtcccatcggcataccattt

SEQ ID NO: 691 - DNA, 490 bp, Arabidopsis thaliana
  misc_feature (1)...(490): n = A,T,C or G
gcggccgcctttcttcccggacgatcccttaagacagttcagaggacaaccaaaccgtaccaagctcatacgcgccgctcaatacatttttccaatcctccaatggtgtcntgagtacagcttcagcctactcaaatccgacgtcgtttcaggtcttaccatcgctagtttagctattcctcaggggattagttacgcgnnnnnngcaaatttgccaccaatcgttggtctatactcgagcttcgtgccaccgttggtttatgcggtcttgggaagctcaagagatctagcagtgggaccagtctccatagcgtcgttaatcttaggatccatgctaaggcaacaagtatctcccgtagacgatcctgttctctttctacagctagccttctcttctaccttctttgctggtctctttcaagcctctcttggaatcctcaggctgggatttataatagactttctatcaaaagcgacgctaatagggttt

SEQ ID NO: 692 - DNA, 490 bp, Arabidopsis thaliana
  misc_feature (1)...(490): n = A,T,C or G
tttttttttatgatgtggctagtaatatttgtttatatatgtgatgatacaaattggcggtatcaaacaaactcaagaccgttaatataatcaaacattttnnnttcctttctaataataaagaaaatacatgattaatgataaacaacaacgacactgaatattaagatatcggtaagtacctcaagatctcacttagaatttgtctcattcttaaatataattcatagagtcagatccagagtactctcctgaccaatcttaaccgtccgatcctcttcatctttcatcagtcggctctttttccacgaagacgaccctggacatagcgacaaggacaacgtttgatccgttgttgttgctgctgtttctgtctcttccaaaattgtcttctccggttgtcttagcttaagagatagatcaagatcaatgctcctacttgcgtctcttttgccatttgtcttgctacaataagaatgattagtgttct

SEQ ID NO: 693 - DNA, 490 bp, Arabidopsis thaliana
  misc_feature (1)...(490): n = A,T,C or G
gccgacaacacgtgaagattttatcaacacgtattcaactccaccgcttaaagattcacttgtccgatttatannnnnaaaaaaaacaagtctaagcattaaattgagaaaacaaaagtacattatccgtaccggctccggtcagatctaattattaagcgcatcctcctggagcaaacccgacccgggaactcgctaagtcgtatacaacccggaaaccctgttgctggatatttccaattatggatagtccgcccatcgtaccggcaaacgcaaaacagaacttgccgttggtatccacagggatcaggtaattcgtcgccggaagtgatacgtcagctccacggaaatgtaaaaccaccgtcggtactttaacctcgttcatattggagagatcgaaacacgtgtcgaagagtgagaaatccggagctcttttcaatgtcttagctccgacccggaacgcgtctctcatagcaatataagctggtcg

SEQ ID NO: 694 - DNA, 490 bp, Arabidopsis thaliana
agaagagtttatgcttacatctggatgggataacaatcagattggatcaggccacaataactttctttcagaagctgagcagtttcaaaaggtgacaaattcaggactcagaatcgacatggatccaagttttgaatcagcttcctttggtgttgggcagacattactaggcagtagaagaccaggtgagaagagaagaacaaaaacagaaaagacaattggtttagaagttcttcgacaatactttgcaggaagcctcaaagatgcagccaagagcattggtgtttgtccaactaccttgaaaagaatatgcagacaacacgggataacacgatggccttcccggaagatcaagaaagtggggcattcattaaagaaactccaacttgttatagactctgttcaaggtgttcaaggttctattcaacttgattcattctatacaagtttcccagaattaagctccccacatatgtctggtactggcact

SEQ ID NO: 695 - DNA, 490 bp, Arabidopsis thaliana
cggccgccgagcaaccgaaaaaacggaaacgcatcaggatacattttgcagctggtctcttaaatggttcataaagagtcaagtataaaaagtaaacacccgagctgtttctgtatctatccacacagatttcaacttctcttatttcatcgtctatcattactgtctccaccgcttccaccaccgtactgtgtggagtttccgttccaaaaagcgtttccatcaccaaacggagcctcatcttcattgtgattcaacgtatggatgttacttccaatccgagaagtggttggtctcctattcctaacgttgctcctaccttctgatggatcttgaaaggacgtccctacttgccccagattgtttctcacctccgtatttggtcttgtttgacgttctggaacagagcttgatgcgttggcagtaccaccgccaaaatatgaaaacgggtttgcataagacagtactcttctaacataagcaaagtaac

SEQ ID NO: 696 - DNA, 490 bp, Arabidopsis thaliana
  misc_feature (1)...(490): n = A,T,C or G
ttgtgtatgaaactcgtgtggaaaataaggctaatcctccaccacctactactgttgattatataactagagacactggaaattccagcccgcgttacatgcgatgcacaatcaatcagatcccatgcactgttgatcttctatctacatctggtatgcaactggcactaatagtccaaccaatggcgctttctcatccatctgaagagcctatccaagttgtggactttggtgagagtggccctgttagatgttcacgttgtaagggctacgtgaatcctttcatgaagttcattgaccaaggaaggaagttcatatgtaacttgtgtggatacactgatgagactcctcgtgactaccagtgtaatctcggtccagatggtagacgtagggatgctgatgaaaggcctgagctgtgtagnggaactgttgactttgttgctacaaaagaatatatggtacgagatccaatgccagcagtatatttctt

SEQ ID NO: 697 - DNA, 490 bp, Arabidopsis thaliana
ggtttgaaagttgggaataggattgaagacagggcagaagatggaagaaataagtttcatggttacaataatgttctggaagagcagttaaaagatgtagagatggatgttaagatgctaactgatgacaaactacgattggaggcgtccgttgaaaggaaggcacatgaagtagacattcttacttctaggatccaggagcttgagacccagttggatagagagaaagatgaatgtaggaggattacttcaagctcgaagaaatttgtgaaagaatataaccgtttcttgcgggcacaagatgatctaaagaggtcagaagcccgtcttcagaaattgggaaaccaacttagtacgtatcttgctggaagtgaaggcaataatagggatgtaggcctggatattgtgagcgatgaagagactaatggtcggaatttgagaactgcttgtgatccacataacgagttgcagaatacttcttcactgtcca

SEQ ID NO: 698 - DNA, 489 bp, Arabidopsis thaliana
  misc_feature (1)...(489): n = A,T,C or G
ttttttttgagttgataagatcaatcttttattatagagaaaaactcactagagaaacaggaaaacattgcaaatcaaaaacatcaagattccgattttgattcggttataaattaactcatgaccattgtagaaaacctgattgaccctaaagattgagttttaaaaagactcagtaatactcgtaaccgcggctagtggacgagctagagtcgctggcgtggacagtagctggcgttggaggcacccaaaattcacgcatgggttcatcgactgggtaaacagtaagctcacggacgttcatcggttggacaacatttgtatcggctccaaaaagaagatgggcaaacatttcttgcgccttctcggagttgtgacgtccgtcnaagaanaggaaagaccgttggtactcacatagcttcgaatgcacgttaggtaaaccgcaaccataagcatcgtgagatccaactccgcagcacgatgcgttcg

SEQ ID NO: 699 - DNA, 489 bp, Arabidopsis thaliana
ataagatatatctcttaacataataattgttttaagagactatcaataatgatggtgtaagaactttcaaaataacaatgaaactttaaaatagcgataacataaacaaaacaaaacaaaaaagacgaacagaaaacagaaagtactacagtgataggtttgataatgtaattagttaattaattgctctaatacagaaacttagggcttgtgattctgagtataaatgtaatcggtgtgaagaagaaggcttcgtcttatcaaacattcttcttctccaattccgttgcagctttcttcttcaaccttgtctccttcaatttccttgacggagttttctctggacaaagcggtggttgtcgtcggagtcagccttgctgcgtaggttagcgtagagcaaagaaggagagccatgatgaaaatggttgtgaacttacccatactgatttgcaaaatagagaaagataatgggagcctgcggacgcgtgg

SEQ ID NO: 700 - DNA, 489 bp, Arabidopsis thaliana
  misc_feature (1)...(489): n = A,T,C or G
ttccggacataagatactgttcgacgtccacgagctctttaagctgggttaggaaccacttgtccaccatgctcaactcgtagatttcatcaatnnncataccctttttcatggcagcatatatcgcatggatcctgtcaggatttgggactcttaggctgtatttcagctgatcccagtcccaatctagctctttaatttttgcacaaccccaacccgagaatccacactccagagacctcagagctttctggaaagattcttggaatgtacggccgagagccatagattccccaacagatttcatctgggtcgttagcaatggctgagatcctggaaacttttcaaatgcaaatcgaggaatcttagtcaccacataatcgatggagggctcgaagctagccggtgttttcctcgtgatatcattaggaatctgatccaaggtatagccaacagacaacttggcagccattttagcaatgggaaacc

SEQ ID NO: 701 - DNA, 489 bp, Arabidopsis thaliana
tacccaaaagcatgattgtgaaatcatgagtcaggaaggccaaaacacccaagaagcagagtatccaagctctgataaagttgcaaagggtggctttggctcagatatagaaggtattggtacagcacctacttcgggaacagaccctgtaggaacagagcaagtcaatgaaactcaaagtccaggaaatgattatgagagaaatgatcatctgaggaagtctattattttagctggtgatacaatgcaaatagattgtgaaactcaggtacatgaaagtgttcagattgaaggagctgttctcttgttaaggaacccgaacgatcgaagggatactcaagacatagagggagtaggtactatagggacgtcggatcttctagcttctgaagttgcggggagttgggctaatagcacgaatccttctgtacatggagaaaacgaaactgaaagaagtagagaagatgaagagagtcagactcaaaaaat

SEQ ID NO: 702 - DNA, 489 bp, Arabidopsis thaliana
  misc_feature (1)...(489): n = A,T,C or G
ggaaatgagcaacatgacctaaacattgctccaggtgaagatgcttcagcggctaagcaaccagaaaagaagcgatccaggtctaaaaagcgcaaatcaggcaacaacctggatttggggaagatggaaaagagcaagccttccgatctggcaaatgagaatgagcaaacagagcccaagtcagccaacaacttggatttagggaatatgaaagagaacacgccttcggatctggctaatgagaatgagcaaacagagcttaggctacctaacaactcggattatggtaacatggaagagagcttgcctttgaatcttgctaatggggatgaacaacctgacccaaccactgctccaatggaagctgctaagcaaccaaaaaagaagcgatcaaggtccaaaaagtgcaaatcanncaacaacctggacnnggggaacatggaagaaaacaagccttctgatctggcaaacggaaatgagcaaaaagat

SEQ ID NO: 703 - DNA, 489 bp, Arabidopsis thaliana
tagcgacaaaggcgttacaaaagcgttacgaaggattaatgatggtaagaacaaaagcagttaaaggcaaaggcgcgtggtattggagtcaccttgaaccaatcttactacacaacaccgacactggtttccctaaagccgttaaactccgatgttctttatgcgacgccgttttctcagcttctaatccttcccgaactgcttctgagcatcttaaacgtggaacttgtccaaatttcaactctttacctaaacccatctccacaatctctccttctcctcctcctcctccgtcttcttctcaccggaaacgtaattcctccgccgtggaagctctgaatcatcatcatcatcatcctcatcatcatcatcaagggtcttataatgtgacgcctcttagtgtcgttgatccctcgagattctgtgggcagtttccggttacacagcagccgcatttgatgctttccggtggaaaagacgatttgggtc

SEQ ID NO: 704 - DNA, 489 bp, Arabidopsis thaliana
  misc_feature (1)...(489): n = A,T,C or G
ctgatcattctactcttcctgcaacaagtaacgctgagcagaaacctgaaacccctaagccgcagatagcagttataccaaataatgcaagcacggcaactgcagcagcactgttaccttctcataaacctagtttgcttggagctcctaggcgggatggcttcactttttctgatggtggaagaccccttatgatgaggcctggtgtagatataaggaaccaaaactttaatcaaccccccattctggctaaaattcctatgcagccaccttcctcgtctatgcattctccgggtggttggttggtagatgatgagaatagaccttcttttcctggtcggccttcaggactttatccaagtcaatttcctcatggaacaccaggttctgctcctgttggtccatttgcacatccatcccacttgaggagtgaagngntagcaatggatgatgacctgaaaaggcaaaatccttcacgtcaaacaacag

SEQ ID NO: 705 - DNA, 489 bp, Arabidopsis thaliana
gcttctcattccatttccatctcctctcttttgttttctaagttgcttcaagagttttggatagtgtagcagagagattttaactaatgggtttataaaattttgttcttttgcgtgaacaagttgtcaacttctagacagattttctttttgaagtgttttcttgtcgaaattcttcttcttttggtcaaagaacgcaagattcttctgtagttcctctaaaaaaaatcctaatggagggttattcaagaaacggtgaaatctctccgaagctgcttgacttgatgattccacaagagagaagaaattggtttcacgatgagaaaaactctgttttcaaaacagaggagaagaagcttgagctaaagcttggaccacctggtgaagaagatgatgatgaatcgatgataagacacatgaagaaagaaccaaaagacaaatctatcctctctctcgctggcaaatacttctctccttcttccaccaaaa

SEQ ID NO: 706 - DNA, 489 bp, Arabidopsis thaliana
  misc_feature (1)...(489): n = A,T,C or G
catcatcttcaaactgttaccacgtccatagggttgtcgaagagctaggaagagccttaccaagagcttcttcttcccctaacatttaggttggtaggagaagcaaaggaagagatcatttataatggctcctgcattcggaaaatgtttcatgttctgctgcgctaaaacctccccggaaaaagacgaaatggcaacggaatcgtacgaagccgccattaaaggactcaatgatcttctcagtacgaaagcggatctcggaaacgtcgncgccgcgaagatcaaagcgttgacgnnnnagctaaaggagcttgactcaagcaattcagacgcaattgaacgaatcaagaccggttttactcaattcaaaaccgagaaatatttgaagaatagtactttgttcaatcatcttgccaagactcagaccccaaagtttctggtgtttgcttgctctgattctcgagtttgtccatctcacatcttgaattt

SEQ ID NO: 707 - DNA, 489 bp, Arabidopsis thaliana
acgacaccaccttcttctatatctacattacaacaccttccaaaagaataacattatatatctaaatccttcttttctttttgtgttcaatctaacaaggatcttaacacagtaaacaaacaaatgtgtgagcgacactttcctctttacttacctctgtggaaaatctgttacgtatcatatcaactcttgagttcaatcaaaggcagtccaagccacatatctcgaggataggaccgcctttcgccacaaacggattgactcgtacccaaagaagcgtaaggatagaggcgagaaggatcgaccagacaagaatgattgtaggcattctgtcttgtttcccaagcagacctttaaggaaaggatatagatggaggatgacccaaaaggcaaagaacaatcttccgaaaagaggaccccacgagtcatatccgttactgatcgcatcagatattcccacaatgactccgattacgtttatgatgagta

SEQ ID NO: 708 - DNA, 489 bp, Arabidopsis thaliana
cgcgccagaaagcggccgcccgggcaggtacatgtatatcatcatgtgatacatcttttgatccggcttcaatggagatttcttctcatctaaaagagtctcaaaaacctcttcagcttctttaaatttgtccccctctacaaaagtcttaagtataatctgataagttatagcagaaggctctgggcctgaagactgcatccttcgaaaaatcgcttcagcattgttgcatttgcctcctctcccataagattccatgagagcggtataagaaatcacgtttggagtcgagcccatcttactcaatacactcaaaaccctttcagctccgttgaagtttcctagtttcccataagctgtaatgagcatcaaaaggtccatttcactgaaattccaccagttctggtatctaagccattcaagaatctcactgacaaggttccatttcttaagctgcttaaatctaaccaaagtacctcggccgcgacc

SEQ ID NO: 709 - DNA, 489 bp, Arabidopsis thaliana
acaaactcaacccaaaatgtgaaatttataaagacatgatttttaaaccatcaaaagctggtgagtaggtgaggcttaaacaatgtcttcttctttgtgggtttcaatggtaacatcagaggtagggtaagcagcacaagtgagaacaaacccttcaccaatctgttcatcatcaaggaaactctggtcagactgatcaacagatccagacacaactttaccagcacagctcgaacaagaaccagcacggcaagagtaaggcaaatcgattccagcttcctcagcagcatcaagaacgtagacgtcgtcgtcacactcaacctctagctcaccttctggtgtgatgaacttgaccttgtatgtagccatggctgtgacacgtccaccacgagcggtgcctgatttgagaccgaagagggattgtgtgttggctgatggaagggaacggagactgattggagctggggaacgacggatgaatgaagttcc

SEQ ID NO: 710 - DNA, 489 bp, Arabidopsis thaliana
gcggccgctaagggattcatgtaaactacttgataaggaaagtgtttacaccaaaagaaaaacaaatacaagatggttcagcaacaaataacagagattaacaacatctcgaggaaacaacaaggaagagaccataaatcaatagcgggttttttcaagcagatttagcagcttcagctgcttcttctgcagcttcttcttcttgaagtttcttcagagacggaggtggtcttggtactatgcttttcttccattgtctgtcaagtttcctcgacaaccttttctttatcccttctttgatctccctctctcttttaaccgtcaacatccgagcaacttgtttcttcatacgacgaaagtcgctagatttgaactcattccttgccgatttctggagacgaagcataaagagctcacctttaaggtcaacaacctcctcttgtaactgctccgtcgtcttcgatcttatctctttcaattccgcctctc

SEQ ID NO: 711 - DNA, 489 bp, Arabidopsis thaliana
  misc_feature (1)...(489): n = A,T,C or G
tctcgcgatacctgacccaaccttagccacgaccaacgccgagaagtagtccggcaccggtagcccgatgtccacctcgctcatatatagaaccccacggtctttcctcatgaaaacgtagtcgtggctcagcgcaaacatcagccccgaggctgccgcgtggccgttcaannnggcgatcgtcggcattggaagatcgaggagggcggctaacaccggtttaaaggatttgaccatttggtgcatccgttttatagcaccgtgtccagcggattgagcccacgcgaggtcaaagccattggagaagaactttccgtgaccggtagtgatgaggacggatccttttgtggattgagactttgcttgttcaagaagcgagagaacnnnggcgatcgtgtcggggtggaatctgtgctcgtcttcgccggttagggttaggagaaagagatcgccgcgcttctctaacgtacacatggtgcgtacgttaag

SEQ ID NO: 712 - DNA, 489 bp, Arabidopsis thaliana
aacaacgcaaagccacggattcatagttcaggatcgctcggcggaatcaaaagccaaaatagagtctctccattgagtgcggttggattaagctcaggccttggaagtagaaggaaatctcttttgatatgtcactcagccattaacgcgaaatgcagtgaaggacaaacacagaccgttactcgggagtcaccgactataacacaggctcctgtacactctaaggagaaatcaccaagcctagacgatggaggagacgggttcccaccgcgagatgatggagatggtggtggaggaggagggggtggaggcaactggtcgggtgggttcttcttctttggttttctggccttcttgggtctattgaaggataaagagggcgaggaagattaccgagggagcagaaggcgataataatatgggccactcttggttatcttattacagctacaggactcattttgtatctgtttcgttgagtgggggatg

SEQ ID NO: 713 - DNA, 489 bp, Arabidopsis thaliana
cggcaattacgtcagcattcttaatcgtcgataaccggtgagctaccacaatcgtagtccggtttaccataacacggtctagcgcgtcctgaaccacacgctcagactcagcgtcaagagcactcgtggcttcgtcgagcagcaacacctttggatctttgacgatggctctggctatagctactcgttgcttttgtccgcctgataattgaattcctctttctcccaccatcgtatcataaccctgttgcagaccactgatgaatccatgggcgtttgataattcagctgaagatacgatttcggattcactcgcgtctcctcctttgccataagcaatgttggctctaattgtctcgttgaacaagattggttcttggctcacaagtcccgtttgttgtcttagccattttagtcttaggctcttgatctctacaccgtcaagagtgatctcacctgaatctggatcgtaaaacctctgcaacaatg

SEQ ID NO: 714 - DNA, 489 bp, Arabidopsis thaliana
  misc_feature (1)...(489): n = A,T,C or G
tttttttttttttttaatgtgaaaaaaaatatcttaatttcaataggttaagaccatctctgaagagatttcgacacattgacgtgaacttttgtatcttaaaaccccctcaaaaagaggcctaagcctaacgaacttgaaagataaaatgaaaaaagactctttgatacattctgaatcagaacaactgagagaaatcaacaatgtcgatatcaaactaaactcgttcgttcccccaccctgacttgacctttgttttggggaagagaacacacaatagctgccttcatcgcgggcaatgatgactacagtaagtcacgagaaaacctgatctagctggtggcaggtatggccacaggctttgagtcctctgctttttcatgttnnttgttcagtaacttgttgttgatcaagttgtggagcgcaattacactnnggatgagggatgatagatagataacgagcatcatgtcatttgttttcactgag

SEQ ID NO: 715 - DNA, 489 bp, Arabidopsis thaliana
aacagtcgcattattatatatttgtcacacaacattttattactcaagcttactttggcagccaaatgccagaagaatatatcatcgaagaattagacgataaaatctttgggagaacatctcataagcttcatgtttttgcttctggctgtacacagagattcttaatggcccacgagaaatgggcaaagcttctgatgactttatatatctataacttggcagctaacaagttcagcagcaccaaagtccttggttgcaatgagtttccatgtaacagtgtctgacttgttaggtgcattggtctttaagtgtgggattgaaacagaactggagctagatgatgatgaggagactgggatgttggggacatcagctcgtaagactgtaacgttatgattagggtctctagtaatgaaatgaagcttgccatgaaacccagcaagcaaataaggagattctgaatctgttaagtcatacacagggact

SEQ ID NO: 716 - DNA, 488 bp, Arabidopsis thaliana
ttttttggagcagaaagcatctttattttaattagcaacttttttacacgagagagatccacaaaaaggaagcataaacaaacaacaaagacatgaagttgcttcacacattctaaaattaaaagctttttcaaatttctcttagtactgataaccctcaccatacatcgtttcatagctttcatattcatgcttattatatctttttgatttatcagcccggcttaagatcttctcaaaagcatcaggtccattctctgcaatgtacttctcagcagctgttaacacatcgtctggttttctgaagatatccatcttctttggcacataccaaatgttaatgctccgagggttaacaaacaccggtctcacaaaatgttcatagacataagcagcgccactaaagtagggaataacaagccagcaagtcaagatcagcttcatgtatgaccatatcggtaaccattcgatgagtttggcgaatgtga

SEQ ID NO: 717 - DNA, 488 bp, Arabidopsis thaliana
tttgttggacaacacaaaaagggaaaaggaaaagcaaagttgcgagagagactcatataatcaaaagagacttggaaacatcttttcatcagccaacttgactaaatagagacaaatgcaggagctggggcaggtactttgaagtcgacacacatttttattattggatcctcctcctctaaggtctttcggcgcaaagataccgagtacttgatttcctcatcataaccaacataaagaacgtcggaaagagttaactcaaagttggtgccagcttcaatctcagcttcattgttacatgcactcacatcacaaaggttgtaagtttttaaaaggccggtaaattccccatctctaaaggctacgtacacaagggttcccgcggggatgtttttgcttgcagaaccgaataaatttatagtgatggttgggttttcgtgaggcccaacagatggagagaccacaatgctagtgacggttccgtaatc

SEQ ID NO: 718 - DNA, 488 bp, Arabidopsis thaliana
  misc_feature (1)...(488): n = A,T,C or G
tttgtctttctcaaaactaaaattactttaattcccatctttatctagtccaaactcatgatgtgacaattctgatcatacatataacaacttaaggagacatgtaatatatattatacccttttctgatcacaattcgtccttcgagtcactttggctactctttgtcgtgctatcgggtgattctttggtctcggtagtttctacttttggtgtggactctgcagttttaggtgattcggttgatgcaggtttctccagtttgaatgggatcgttgcgtgtttccttaagaacttgtaaaatgcaaccacagtgcggtctgtatctacagtaatcggctctgaagtcttgttgcccgcannnaagaagagaatggtagggaanncctcagcctttgccttgggatgttcattggttgttccatccatcttggttatgacgagagaatcaatacttcgtaaatgcttggcaagtttgttatacattg

SEQ ID NO: 719 - DNA, 488 bp, Arabidopsis thaliana
ttttttttttttttattcaaaagtatctcacataaaatgagaataaatttttttataaattacaaaacaaaaaaagagacaaaacagcaaacgaccctaacaagatatacagcgttttgattgatgcttattcaaaagccattaagaattacgaaagcgatttcaaagttgaagaaaggacacaaaaaaaaaaaaaaaaaagttgcacatataatatctcattttcacatcactatctctggcttcaagatgtttgatttgatctccttgtgtggcaaaacaactcctccattgctatagatctcatcgctcacatgaacatcctcaccgaggatcgtcatgttctcgatcctggcccattgaccaaccgttgagtgccacccgatgatactgctcgagatacacgcatgcttcttgatgcggactccacgcatgaccgtgcatcgggagagtctgactcctgactcaacaatgcagcctggaccaat

SEQ ID NO: 720 - DNA, 488 bp, Arabidopsis thaliana
tcgagcggccgcccgggcaggtacaagagaagagttatggagaataacctcactgcgattgaatcaatggaaaatgaagaaggagaagtaggagaagaattagtagtagtagaagaagaagagtgtgttgaggagagtcctagaacaaagatgaaccttggagttatggttttggcatcgcgttttgcagctaatacaagacgcggtgttgcagctcagagagttaaggatgtagaattaccccggtttaagaaacccgaggagcctgatttctctgctgagcatgatgattgactgatgtataaccaggagaagaagctgactttgttccatagaagatcttaatgacaagaacactacagagtaagtttcctgttcctttgggagacataaagaaagaaactcaaggcgggttttggtttgtacacttaaacatcttttgtaatataagcttggagaattagttttgttgtacctcggccgcgacc

SEQ ID NO: 721 - DNA, 488 bp, Arabidopsis thaliana
  misc_feature (1)...(488): n = A,T,C or G
tgatggaggaattttgttttcaagtccaacggttcatcgtaaaatataagcaaaagcattttacaagagaaacatgacattaaccaaaacatgacataccataagnnngcaaaacaagaacaatgtaataataccaagatacacacactcgctcgcaacaccacagattctctacagcttaacaaccactggataaaacaccttaatccgggtcacagttttattcttcatacaccacaatgcaactccatctcaaactttatagtttaagaaacacaaactcttcaatcgcagaaacacccccaatcctctcaagtgttttgttgtctggttcttcatcaactccaatcgccattatcgcttgtttcctcaacactgttcttccaacactcatgaaattcacattcacgttttgttctccaagtatgttaccaacctgtccaatcatccctggttgatccacttgcctgcacagtatcagattccct

SEQ ID NO: 722 - DNA, 488 bp, Arabidopsis thaliana
tctctctcgtttctccgattccgatatcaccgtctcctccaccggaaaatccataacgcgattaggtttttagcctagttccttaatctctggttattgattctttcaatttctgatcgatgacattgtccaagcgattggctctattgggagctcaatctgcgattactctcgctaaacctcgaggtctcggttcctctctcgggttacttgatcgtcgtccatttccgtatcgtcaattttctgagctcacgaaagctaatgggagacgtgcttttctcgttgatacattggctctggtgaggagtcttgaagctcaaggagttccatcgaaacaagctgaggcaataacttctgctattactgaggttttgaatgatagcttggaaaatgtctctgagtcttttgtgtcgaaagcggaaatgcagaagattgaaatgattcaagattcaaatttatcgaaatttaaatctgaagtcaaaagttct

SEQ ID NO: 723 - DNA, 488 bp, Arabidopsis thaliana
ccacgcgtccggaagcatgggaaatagtattgctgggcttggagctttaggcaaccaattgaatatggcaggaagaggtatggggggaaccggaatctcatcgtcaatgtctgttcctggcatcggtaatatgggccagaacccaatgaatctgaatccagcatcaaatttgaatgctataagccagcaactccgatctggtgcattaacaccacaacaaaacgctctgtttacacagattaggatgggcatggcaaaccgaggaggtgtaatgggtgctcctcaaaccgggataagtggcgtgtcaggtactaggcagatgcaccccagctcagctggtctttccatgttggatcagaacagagctaatctgcagcgagctgctgctatgggtaacatgggcccacccaagctgatgcctggaatgatgaatctttacatgaatcaacaacaacagcagcagcaactccagcagcaaccccaacaac

SEQ ID NO: 724 - DNA, 488 bp, Arabidopsis thaliana
  misc_feature (1)...(488): n = A,T,C or G
aaagcttcaatggagaagagtaatggccttcgagtgattctgtttccacttccattacaaggctgcatcaaccccatgattcagctcgccaagatcctccactcaagaggtttctccatcactgtgatccacacgtgcttcaacgcgccaaaagcttcaagccatcctctcttcaccttcttagagatcccagatggcttgtccgaaacagagaaaagaactaacaataccaaacttctcctaacgcttctcaaccggaactgtgagtctccgtttcgtgaatgtttgagtaaactgttgcagtctgcagattcagaaacaggggaagagaaacagaggattagctgtttgatcgctgattctggatggatgttcacacaacccattgctcagagtttgaaactcccaatattggtcctcagtgtgtttacantctccttctttcgctgccaatttgttcttcctaagcttcggcgtgaagtgtatct

SEQ ID NO: 725 - DNA, 488 bp, Arabidopsis thaliana
cggccgccaaaaaagttgaattgcatttcaaggaaaagtgattttgaatcatatgaaaattcttgagggaatcattgaaaattcaaatcccgggttcgatcacagactctcttttaaggttactgacgaattacaagatcgatatcggccccaacttctgcaatcttggcttcctttgacgccttcgctgattttgcgatgctctctacatcaaaatctatcgctatcttcttcacgagaccttcaagcatcagtgagccaattgctaccagactccggaacttggaatcaacatctgcagcttcttcttctgctacctgcaaagctgctgaaaggacttgagcttgaccttcttgatccttcttttctattaatagcactgcataattgagaagcaacgtcgaataagccaactgcagattcttatttggggatgaataacagtttgagaaggcatcaagaatttgactatgatgcgtctgtagcca

SEQ ID NO: 726 - DNA, 488 bp, Arabidopsis thaliana
aaactttgaagattgatttgaagaagaaagctctctctcaggttcttgttctcaaccagacattgatttcttcgatttgcatatttcccttcttcgtcttacgaattttacttcctttagcgatggatttgatactacgttgacttttatcttccttttggaaatggcagcgtcgtcttctcttcttcttcttcttcactatcccacctgcaatttctactttgactcttcctcgtaccttaaaagatcgagactttcgagctatagttcgattatctctcgtgggtctcctttgtttgtctctagctttggatctatgaccgttaaaagattctctagcagagacggaagcaggagcaatgacggtaacgaacaatttggagcgttggagcaagaatctttcatcaacaactcatcggagatacggaaagacttggtcaccggcggtgggattgaagccattgttaatcgtctgagcaaatgggttg

SEQ ID NO: 727 - DNA, 488 bp, Arabidopsis thaliana
gcggccgctatattcctcaaccagtagctggtaacgcaactggaccaaattcagttgttggcgcagctcaatacccttatcaaggagtaactcagccaggatacttccctcaaagacccggttacaactttccaagaggccctcctggttcatatgacccaacaacaaggttaccaacaggaccttacggcgctccattcccacctggaccatctaacaatactccttacgccggtacacacggaaaccctagtcgcagatgagtccaccagctaagagtacatatataaataactcaccagctacagattccttcaactgtggaattgttgcctgtttggtcccataatctttatgggtaaagagaagttggtacagtggtgaacgttgagtgctattgtttaactgattttgttgagagcttgacttttgtgagacggttttcaacaagttttgtgatacagagagatgtaacatcggggcggccg

SEQ ID NO: 728 - DNA, 488 bp, Arabidopsis thaliana
agtagggttcctttgaagattgagaacaaaaaattaaagctcttgcaagtgtcttctcttgaacgcattgatgccattgaagtgtcaacaactagtctagacattctcgccatcatagatatctgctgtcggagagatgacctttccctccagtccccccaactccaatttaatagaaacttttgggttctagggccttacgtgcctcacatcagctacaacatatcagaggaaaagagcattgggaatgaagaatttgtgaacaccatatatgaagttgagaggttacgacaagtcttaggtttatggactcgtaaaatactggagctcgagattatatttaaggataacaatggtcctagggaagaaaataagtcttgggataagaagttgtgggaggataataataagaaagatccgttccccaatgctaaattccgcgtggatactgtgtggatgtataacttcagcggctcagaggaagagtt

SEQ ID NO: 729 - DNA, 488 bp, Arabidopsis thaliana
ctcctggtactttggcacaaaatctacttcaaagtccgggtggcgacttaaaattttggaaaatgaaagagcttgagaagcaaggatcgggagacctctgtgttgtaatatatcattctcagttgattgtccttggtggacaacttagactacttcgaggtggacttggaaggttagtttcttgttgttgtcgtggtcttctagaagcttggtaagcggcaacagcttccgaaaaccccattgtgtagcctcagcgcagaacaaacagctttgatcattaggggatctgcagagctcgttgccggattgattcaaaataacgaagaaaaagcgagttctccttttccatccaagtctcaatgattcaagattaggtacgttcagaaatagagacaagtgattatcataaccagggtagcccttgggatgaagaataatacacctagagacaaaaccgaaagttgtgaaatcttttacctgcccgggcg

SEQ ID NO: 730 - DNA, 488 bp, Arabidopsis thaliana
ctttttttttttttttttttttttttttaaaaagaaaaaactttgttctgcttgtaactgttttatacacatgaactcggagttcaaagaaagccagcctctgttcttgggcacaatcattttttcacaaatgcagattcagccaagtcgatggctcgagcaagaccagcggctttgttctggcactcacagtgttcgtcttgcgggtcactatcagctactacaccagctccagcttgaagataagccacccactcacgccgtttgttagcatccttgtaagagtacattgtattgtattgacatgctgtcggaaaaacgattgtcctaagggataaagcaatgtccatgtcaccagtgaaggagactccaccaaaaccgccactgtatggtccacgcctcgttggctctagctcatcgattagttccatagctttgacctttggtgcaccactaactgttcccactggtaaagccgcacgtagtac

SEQ ID NO: 731 - DNA, 488 bp, Arabidopsis thaliana
ttttttttttttttttttttttagaataatgttttactcgatttcaattacgtcaagaaaatcttaaatagcggtacggtacacaacaagatcacacattggtttgtggaacttctttagttcttattttactatgtttcttcaaagctgtgccagccttgaaatatccatagggtaagcgtctgaagccgattgtgcattgtacgatctccttgcgatgatcacatttgcggcttcagtagggtgaaatgcgtcccagaacacgtacgcattgcggtctctacacggtctctgtcccggtaaacatgtgatctgtccagcattcctcccaataccgcaacatcccgcgttcgtcactctaaacccaaatctggcaggatttgtgatcatgtcctggaaaatgccataagcattgatgtagatgaactttgcatcagggtgattgttgttgagctgatcaacaagagatcttagcttgttgttgaaga

SEQ ID NO: 732 - DNA, 488 bp, Arabidopsis thaliana
  misc_feature (1)...(488): n = A,T,C or G
cgccttattcagagtgtagaggaggatccaaaagaaaagaggaaaaaatggactatatgtatggaccagggagacaccatctgtttgtaccaggaccagtgaacataccggaaccggtaatccgggcgatgaaccggaacaacgaggattaccggtcaccagccattccggcgcttacgaaaacattgttggaggatgttaagaagatattcaagaccacatcagggacaccttttctgtttcccacgaccgggactggtgcttgggagagtgccttgaccaacacgttatctcctggagacaggattgtttcgtttctgattggacaatttagcttgctctggattgaccagcagaagaggcttaatttcaatgttgatgtggttgagagtgattggggacaaggtgctaatctccaagtcttnncctcaaagctctcacaagacgagaatcataccatcaaagccatttgcattgtccacaacgag

SEQ ID NO: 733 - DNA, 488 bp, Arabidopsis thaliana
ccacgcgtccggacagctacaaagtcttccaccagaagtacctcatcaacaaccgtttctggcgaaaaggtggtcccatctttgtttacactggaaatgaaggagacatcgactggtttgcttccaacaccggtttcatgctggatattgctcccaagttccgggctcttcttgttttcattgaacaccggttctatggagaatcaacgccatttgggaagaagtcgcataagtcagctgagacattgggttacctaaactctcagcaagcgttggctgattatgcaatcctgataagaagcttgaagcagaatctatcgtctgaggcatcgcctgtggttgtctttggtggctcttatggtggaatgcttgcagcgtggttcagactcaagtatccccacataacaatcggtgcattggcatcctccgctccaatacttcatttcgataacattgtaccattgacaagcttctatgatgccatttct

SEQ ID NO: 734 - DNA, 488 bp, Arabidopsis thaliana
  misc_feature (1)...(488): n = A,T,C or G
ccacgcgtccgaaaaatggagtcatcagtgaaacccaatcctttcctctccttctcttctttcattcaccaccagtgtacccgcttcagctccgacctctccgcccgaatcgaagacacgaaacgattcgccgaaaccctagctactcgacgtttctctcttcctactccgccgcctttcgcctccgtctcacaatccaagtctggaaccccgacgacgacgttgagtccatctcttgtcgctaaagctctcgctgggacgtcggtgtttacagtcagtaacaccaataacgaattcgttcttatctcggatcctaccggaggcaagtctatcggtttgctctgttttcgacaagaggatgctgaagcttttcttgctcaggcgcgacttcggagaagagaattgaaaaccaannnnaaggttgttcccattactctggaccaggtgtacttgctaaaagttgaagggatttcctttcgcttcttgcc

SEQ ID NO: 735 - DNA, 488 bp, Arabidopsis thaliana
cacaaatcaaccacacaagagagaagaagagacttggtccttcatagaacataattgaacaaacaaataaatctttttacttctggctttggaagaactaatttagaaggcgaatcgtcctatttgcatgtaaggcaagaaagtcttcttcttcaaatctttcgtttctgctttcttagacatgtaatggaattcatgggcggagaccgatgatgaccctcttcctcgtgaactcgagttcttggtgtcttcttgcttcctaaacaaacttgtaaacgtctttaccgaatctttgttgtgccttgctcttccttcggatgcacttcggaacagaagaaagtcctttagtctccatttctttgaggaagatgacttgcaagacacgcaagctgatgaagatgtagatggaatagaagacaaggtccctttcctctgttcttgtacctgcccgggcggccgctcgcgccagaaggtaccgagctcgaatt

SEQ ID NO: 736 - DNA, 488 bp, Arabidopsis thaliana
cgcggccgaggtacagcacattgcctgttcggtaaatctctgaagaaggaaacggactatgaaggaagaaaccgagtttgatcctattaaaacgtttcctcaagaaagtaggaagaaccataagatgataatcttgaatccaaacgtaatcatcctcagggttgataacttccataactctatctgaaaatatcttgttggctgatacataagcttgccaaagacgccggtcaaaacgatcaccatggtcagggaacataggaagcatatagtgaaatagcggccacaaatgatgtttacagaaaccaagatagaacttctcttgcatctccttgggtaaaaacgtaggaacacaattgaaatccaacaaaagcttatgagaaacatcttcttgttcactgataccaatatcagcattaagtgatcctatataaacaaactctgtatccgaagaaaacccatctctgagttgcaagagaagagaatct

SEQ ID NO: 737 - DNA, 488 bp, Arabidopsis thaliana
tcaatttggttcgtgcagagaactcaaatgaagagacagagatgaacaaatgcaagtctgccgttagacgtatcagaaagatggagaaagatgttgaagatgcttgctccactgcaaaagacccgaggaaagaatcattggcaaaagaattggaagaggaagaaaacattctgagacaatctgttgagaaacttaaatctgttgaagaaagtaggacatctctcgtaaatcatcttagggaagcgctacgggaacaggaatctgaattggagaatcttcaatctcagatacaggtagcacaagaacaaaccgaagaagcccaaaacatgcagaaacggctcaataacgaaacaccggttaacaataacaacggaacatctggtcaatcagcgaaaatcactcctgcctcaatcgctgcaatggcggaaatgctaacctcatcaacaaactcatcaatgattatgcattctgtcctctcttcatttgca

SEQ ID NO: 738 - DNA, 488 bp, Arabidopsis thaliana
actcttaccatctttacaaggaagatgtggcgttattgcatcaaattgggtttaatgcatacagattctcaatctcatggtcgaggatcttgcctcgtgggaatcgaaaaggaggaatcaaccaggctggtattgactattacaacaacttgatcaatgaacttttgtccaaaggaattaagccttttgcaaccatgttccattgggacacaccacaagcccttgaagatgcttatggtggattccgtggtgccgagattgtgaacgatttccgcgattatgcggatatttgcttcaagaattttggagatagagtgaagcattggatgacattgaacgagccattgacagtggtgcaacaagggtatgttgcaggtgtaatggctccaggaagatgctccaaattcacaaaccctaattgcacagatggaaatggagccaccgagccttatatcgttggtcacaacctcatcctttctcacggagcc

SEQ ID NO: 739 - DNA, 488 bp, Arabidopsis thaliana
ttcaagcctcttcttcctccaccattggtgagaccagtgatggcttgaaggtccagtctcatgtttcaattggagcaaacgatctgctgattgttggaccgggtgttcttggacgcttagttgcagaacagtggagacaggaacatccagagtctcaaatctttgggcagacagtaacaacaaatcatcatggtgagttggagaatttgggtatcaaaccatctcttaaaggaaccgaatatgggggaaagttctcctatgtgatcttttgtgctccaccatcacaaagcgctgattatgctggtgaagtcaggaatgcagcatcaaactggaatggcgaaggatcattcttattcacatctagttctgcaccttatgattgctttgataacggagaatgcaacgaggattctccagtagtgccactgggaaagagtccaagaactgatgtgcttttgaaagctgaaaaagtagtgttggaatgtgga

SEQ ID NO: 740 - DNA, 488 bp, Arabidopsis thaliana
gttgtttccggcgccgatggtcctatgcctcagactaaagagcatatccttttggctaagcaggttggtgttcctgatatggttgtgtttcttaacaaagaggatcaagtagatgatgcagagttgctagagctcgttgagcttgaggttcgtgagcttctctcgtcttatgaatttaacggtgatgatattccgattatctctggttctgctcttttagccgttgagactcttactgagaatcctaaggttaagagaggtgataacaaatgggtagataagatttatgaacttatggatgctgttgatgattacatccctatccctcagagacaaactgaattgccattcttgttagctgttgaggatgtgttctctatcactggacgtggtacggtggctacagggcgtgtcgagagaggtacggttaaggtaggagagactgtagatttagtgggtttgagggagactaggagttacactgtcac

SEQ ID NO: 741 - DNA, 488 bp, Arabidopsis thaliana
cggccgccttcgtcatcgtcccaaaaccaaccagaacggctctgtgatcggaaccgccgtatacatcaattcaactacgtatgtgccttcgtcccttagcttagccagattcatcactggggatttcatcagcagccgtacaattatgccctctggttgcagtatcagagctctctggatcatcaacaatcaagacactgttgttttctccaggtttccggtcgtcgagaagcaatggtgctccgcttacaagacggagaacgaaaacactggattagatcttcctagacttcccactgatcaacaaatctccgattcttttactcgaagaaagagacgggaaggctctactcgtggatatggtatacgtgttgctcaatccaccaaaggatcggattcttgggttgatgatcccatcactcgtcatattatcagcctttgcttaaccgaagaagatgatgatgatgatgatgaaaggaacattctct

SEQ ID NO: 742 - DNA, 488 bp, Arabidopsis thaliana
cggccgccaaaatcactgactggccatatgagatggtttttgtgcatagatgagaatcctggaacatgctatacttgtatattatacaaaggcacaatgtacaatgagtcagataataagagtcactcatacagctctatcttgtctccctgttccatagatcatacacagcatgtgcaaccactgacactgaaacctgactaagagtcaaggcaaccaagagaccaaaactggaagactcattttcgcatctcctgcaatcaaagaaatgaactggtaacctcgggatcaagtctcagcgaaaggaaaaggagtgttattgggtgaagaatggttacagttagtcacatgttggtttccctgagcggtttcagacagactgaactccatgtcatgtgtttcagaccatccaggctcatatgtctcaaggaaaccgattttcgctttattgggtaggtcgtgaggatgaacaaatggaactccgtgcg

SEQ ID NO: 743 - DNA, 488 bp, Arabidopsis thaliana
aagaggacgaaaactctctttacacaaatgttttttgctttccatctttatataataaacattacaatgcaatgccactctttaaacccaaacctcagtgtccgttcgatggcctgaagtccctatagccgttgattccagacaaattcgggtttgatgaatctaaatcaaagtaagagtaagtagctgttgctgatgctgatacatcgtcttggttcctcatagccggtaaagagaaatccatatttgccatctgccattgcgattgtgtttgcccattaccatatggcgaggaagaagcagaatgtggcatgtattcaccgtaagactggtgaaatccatcatcactgtaactcctagacctgctagagatcccgagatccgcaccgccatgatatgagtactggttgttgaactgttgtggtacacggtatacgctattatccattgtaccgtgttcgtctgcaagcagatcattgatgatatca

SEQ ID NO: 744 - DNA, 488 bp, Arabidopsis thaliana
taacaacttagagaagttggtcagcttgcaacaatactcttcggagctcactctccatagctcttaacaccactggctttctcacaactccattgattccaatctgtgcacacttgtcccacatttcttcatccaagctcactgtcgtcgccacaatcaacggccaagatcgactcctgatcctcatggccacttcataaccgtccatctctgccatttgaagatcaagcaccaccacttgaaacgaagtagaaggcgaggacgagccgggagcaatggcggtaaggcaatcgaatccagaggaaaccgcggttacatcgcacccgagtttctctaagagtttacgtgtaactgcccggttcgaatcgttggtgtctaccaataaaacttgtaagccacgtaacagagaattcgaatgtgggtgagcgtggtggtcaggagctggcgactcgctggatccatggacagatatggagggtctacgtcga

SEQ ID NO: 745 - DNA, 488 bp, Arabidopsis thaliana
tgaagaagctgccgccgatcacatcttccagcttccagagattctaaagcttttgtcttttgatccttcatcgaattcattgagttattggggagtttttgttatgctgaaaagagatgtctttgaaaagcatccttcgtgatctgaaggaagtgagggatggacttggaggcatctccaaaagaagctggtcaaagtcgtctcacattgctcctgatcaaacaactccaccactggaaaacataccacagagcccatgggcttctttgccgcctgagttgcttcatgacattatctggagggttgaagagagtgagacagcttggcccgctcgagctgctgttgtctcttgtgcttctgtctgtaaatcatggagaggaatcactatggagattgtgaggatccctgagcagtgtgggaagctcacttttccaatctcattgaaacagccggggcctcgagactctccaattcaatgctttattaag

SEQ ID NO: 746 - DNA, 488 bp, Arabidopsis thaliana
cggccgcagagggtccccacaagtcacagtgaaccctctcaagaggtctatttgaagtaaatgaagaagaaacaaatggcagcctagtgctcttcccaagctgacatgcttcacagagtgacttagaagtcttattgatagagatagagttggtcttgaccagttgctgcaggacttgaggatgaggatgtccaaggcgtctgtgccacacttcatcacttgcggactgctgacgagtggagaagaaagccttgaactgagagtcatccttcagacaatataaaccatcacaagtgcttcccattatgagaagcttcttggttgcctgatgaggaagccaagtttgttgagccagtgtgtgtaatgggcagaaaattaccatcagcaaccatgacagcatcagatccatggtatggttgagattgttgcagggatcgaggactgtttgtgacatgagcagttgcagcagaatctggaagccattcatt

SEQ ID NO: 747 - DNA, 488 bp, Arabidopsis thaliana
  misc_feature (1)...(488): n = A,T,C or G
ttatcattttcaactattcgcgttgggttactgatattttcccggtcatctccggcgttaattttccgatcaggctccaaattctcaaagatggcaggaaaccaatctttaaaagattacttgaagaagtatgaaagtagtgatgttgtagagaagaagaagaagaagaagaagcagaagaagccatctaaacctgaaccaagaggtgttttagttgtcgacgaagatccagtttggcaaaagcaggttgatcctgaagaggacgaaaacgaagatgattcagcagaggaaacacctctnnttgatgaagacattgaagttaagcgaatgannannttggaggaaattaaggcaaggcgtgctcataatgccattgctgaggatggaagtgggtgggtaacgttacctctaaaccgtgaagacacacaatctaatatttctcctccacgtagacaaaggactcgtaatgactcgccctctcctgagcc

SEQ ID NO: 748 - DNA, 487 bp, Arabidopsis thaliana
  misc_feature (1)...(487): n = A,T,C or G
ttttttttttttttttttttttttaaaaataatttcatgtatttcataccaaatgcatacaaatacatatgtatttattttagtcgaatacaaatatgtatttataactcgagaaatgctttcttcacttatattccagatgtgttactatgcgcaccaccaggaatggtcacattgctgttgtcgcttatagaagaaaccaatttgttgtcatcctcacttttagttgtgataggcaattcttggaggctattcttttcaaggatatctaatccggatacttcatagtcttttccttttccccaaacaaccatatacaaacccgcggcgatcactgcccctcctattacacatccgaaatggatttgttcatgaagaataaaagaggcaatgagagctacaagaatcatgcannnngggnnaaaggcagtaacaaaaactggccctctcgtcttcataaccatcccttgaacatagtacgcggacg

SEQ ID NO: 749 - DNA, 487 bp, Arabidopsis thaliana
ggcaggtacattagaatggtcttccccaccagatccgaaacaagcacctttgccccatcttttccgagaacgtagttgagatcacctgagacaagaagtgactcgagtgtttgagcctctacctttgcattttctatctccttgagttcttgaaacttctctggagtgaaaggatacgcaagaactccatagtcatcaatagcttcagcgacattcgagtgacgggtttttccatcaagcccaagaatgaccagcgtcggtagtgttgacagcatgaaatgccgagccaatttcgatccacttttgtcgttgaacggcagtgctagccatggcttggtcttgaagtccatattaaaagactcctcatcatcttcaagagaaatcaacacaatctcaaaatcctccttattctccttcagcttcgtataaaactcaacaagctttggggtaaactctgtgcatttcctgtaagaggcgacggagaaga

SEQ ID NO: 750 - DNA, 487 bp, Arabidopsis thaliana
ttttttttaaattgtatggtaataagattacattaatatggtcgtcatttacataatccctttagcaacaaactgaacaagtaaaggaagatgcttaatggttgtcgacacagaattgttattaagcaatctcttaggtaaacaaaaaaaaacagtgagttcatatgtaggataagcttgaccacaaacttgacaatatagatggttatgagattgtttagaaaagtaaagttgcccatgcagcaatgaacgcaaagcctccgaatggtgccaatgtcgaaaactttctgtcctcccgcagcgctaccatataacacgtgccggaaaaggctacaattccagcagtcaacaagccaccaaaaatgttgggatatttggtgctaggagcagaaacaagagcagcagtgtgaaccaaatggtaaagtgaagccgtttgccacacctgtttgtaagaagggttctctggtttaaagacatgagcaccata

SEQ ID NO: 751 - DNA, 487 bp, Arabidopsis thaliana
aaaattattcaccttgtttgttattcttatttctgcaaaaccagacaacaattcagtaatcaaaaggacacatacgtaagttgaaattggaaagagttcttcaccaaagctaacttgatcctcacgaacgtctcctaaaatagcaatcttcagctgaagaacaacacacgcctcctaataaactcgttgtctttctcacatacacaaaaccaaatttagcaaaatggttattattacctttctccctcctttcggaaattgccaccaccaatcaaacaatctaccttcttcttcattcatcattcacttctcagaattttgagaattttgaattgagaattgcgagagagatctcattctccctctcgcaattctccgtcccctcgaatccaacaaaaagattttaatgtaaaatcactctattgatccacaatgtcgatgatgttcccatcgtttcagttgctagaacttaacataatatcagctc

SEQ ID NO: 752 - DNA, 487 bp, Arabidopsis thaliana
  misc_feature (1)...(487): n = A,T,C or G
cggccgcctcggatattatgattagtcatatatcgttacgacaggcattgatcgtctgataggattagatatggaacgactctatacacgaaaatatttagtctttctgtagaatctatccctcttactaaggaaccctttgctttgggtcttgacaacaatatacattagtgattctggttctgtgttggtgtaggatgttcaggtaatcangtacgaagtgcgactggagcagacagagataagtagttgacgtaaccttcagagaccgagatcacaaaccgatggcaagcaagcgcagtggtggtgagagacatgacaaaggaagtccagcagaatctgagcatcaaaactcggtcactctttgcagactccagtatctttctcagtattactctgacccgcttgtcattgattagaatcttgaagtctttgactgtaatgttgattcctgaagatggtggtgggtctgaaagagaaatgaatt

SEQ ID NO: 753 - DNA, 487 bp, Arabidopsis thaliana
tctcttgagatatcatctcctaccaaagagaagttgagtcgccgtcaatctagccataaagaagaggaagattcatcgtctttgacagattctggttctgattctgatcattcctctgccaatgatgaagacggtgacgaggcattgatccgtagaatggctgaacttgagcttgagcttcaagagacgaaacagaagctccttctccagcaggaaagtgttgatggtgacaacaatgttgatctccttcacaaaattactacatatgagggagagcttaaagaagctaatgagaagatgcgaatgcacgaagacgagattgctaatctgaagaatcagcttcagagcttcatgtctttgacacagaggatcatcttggtgctgaacaaaagagtgttgatttggataaagaggacactaaagaagatgcagtagctacaaaagtgctagccttggaggaagagctgagtatcgcgaaagagaagct

SEQ ID NO: 754 - DNA, 487 bp, Arabidopsis thaliana
ccacgcgtccgaacttttggtgctatgatgatatcgggacaaaaggcgggacaacttgctcttaaggctttggggctaccgaatgctattgacggaactctcgttggaaacctaagcccggagctggtcttagccgcagcagattcagctgaaaccgtagatgcttaaaatcaaaaggttttaacgttaagaaaagtttcccttgatccttcggatgttgaaggagtgcaataaaaggagtttaggtgtttaatatgtcttgaacttttctggtgtctttgtttctctcttctgaacttctgtgtaaaatatcgtatccgttcattcgtaatgcgtatgttctcgttcttctccttctttatggctctagtacaagcagctttctcgttgtcgttggcaatacaaaatctgtctaaatttgagggatgagattagtgttggatgtcggattcttgtcttcaattctgattcttatccttgaaaaaaa

SEQ ID NO: 755 - DNA, 487 bp, Arabidopsis thaliana
aaaaccctttcttaataatcgggaatcggaagactaatgatgtttccatacaaagtacaagcatgctggatttcgttttattactaacgtgactgggacgaagtaaaccaaaagataagcgagtccagaacgaattaaaaccacatcaaaatcaagtggtgaacttgtaaattgttatgttctcagcaactgagagacttacttatctcctccaccacgactttgactgtacaaagaggaaaccacgatcaaatgtgtaggttttacttctctgctaatgtgcttgaaacctgttcttcatctcctgtggttgttttcaggatgtggtctgagttagcctcaggtgtgtcttcttcactcggaggtacaagttgccagaacattgctagatacttatcccactcttccacaatcattgcccctttgctgcttcccgttttctccacatgagcctggatcaggcttttaagctgtgtttgtcccactg

SEQ ID NO: 756 - DNA, 487 bp, Arabidopsis thaliana
tttttttttttattcaaaagtaatcaaatttattctttccgacacaaattaagtcccacacacattatttgattaatatcatagcttggtaaacaaaaaaaaagccgatacatagtatattaagttttaactttgaagtcatcgatttggatgttttcgatttccagttttcgaaaatcgcttctattcctactgacgtagaacttaccccatttatagcctttgtattttggagggttttcaggactcacaagttcttctaatggcttcacttccacatcgtgtgaaggcaacaagaagaatggtatcgagtatctctctcttgttgtgttcaccaccactctatgttcagcactccaatacttgtcattcgtccatatctccatacaattgcctatattgatgacaagagcattagggacgggtctaatcggaaaccaaacaccgtccgatctacgactaacttgtaatcctccaacatcatctt

SEQ ID NO: 757 - DNA, 487 bp, Arabidopsis thaliana
ccacgcgtccgcgatcgaagcaaaagcggcgcatctgaatcccaaacgagtgacgatgacgatcgattcgcagcaaaaaacgagcaaattcagatggggggaaatggacgaagacgacgattttgatttcttgctccctcccaagcaggtgattggtccagatgagaatggtttgaagacgacgatcgagtacaaattcaacgatgaaggaaataaggttaagataacgactaggacacgtgtccgcaagctagcttctgctcgactcaacaaacgagccatggagaggaggaactggcctaagttcggagacgcagccaatgaggaagctggtagccatctcactatggtttctaccgaagagatccttctcgaacgaccccgagctcctggtaccaaagcagatgaatcaaaggcaacaggagatggcttgtctcagctgggtaaaggtggtgcagttctcatggtgtgcaggatatgccacaag

SEQ ID NO: 758 - DNA, 487 bp, Arabidopsis thaliana
tacttgatgcggactacaacgcaaaactttctgactttggactagctagagacggtccaatgggtgatttgagttatgttagtacaagggtcatgggtacttatgggtacgccgcgcctgagtacatgtcatcaggtcacttgaatgcaagaagcgatgtgtacagtttcggagttttgcttctagagattttatctggtaagcgagcgttggatcataacagaccggctaaagaagaaaaccttgtggattgggctcgaccgtacctcacaagcaaacgtaaggttctcctaatcgtggacaatcggctagacacacagtacctacctgaagaagccgtgagaatggcaagcgtggcggtgcagtgtctctcatttgaacccaagtcgcgcccgaccatggaccaagtggtccgtgccttacaacaacttcaggacaacttgggaaaaccgagtcagaccaatccggttaaggataccaagaaact

SEQ ID NO: 759 - DNA, 487 bp, Arabidopsis thaliana
gttctctggttctttccatgatccaattttaagggtttcacggcttcgtttttttgggtatatctagctctatcgttcgtggtggttttctttctggatcaaagttttctgagatctctgcgatttctgggattcgaaaattggagaattagggcttttttacggtaacagggtttcgaagagcataagataagaatgccttcggtgccctctaagcttcttcctctcctgtctttgattccttcgttgactccttatcattctggtttgagttctaatcgtttgaaacctcttgaaaagtgtgattggcgtggtaatcttagttaacatttcctttccttcttctctcctttttaccctttcttctctcgccctcgtttacttcttgagattttcttagctcgatttgatctttggtgctttaacttctggcggtgtttgatttgcagcacaaaaagttactactactactgtgattaccttgtac

SEQ ID NO: 760 - DNA, 487 bp, Arabidopsis thaliana
tctccggcgactactatcaccttctttttcttcttcactctctcatccttcttctacatcacttcttcactccagaacaacaacaacaacaacaacaaacacacagcaaccgttaactccttaaatatcccctccgccgcggcggagattacgctagtaaacccaaagcttccgccgcggagtctctccctcacatcctccaaaaaattcgaaggatcttcaaatctagtccacctccgttaccacatgggaccagtcctctcatcttctccgatcaacatctacgttatctggtacggacaatggtcacgcccacacaaatccctaatcagagatttcctcaattctatctccgacgctaaagcaccttctccctccgtatccgaatggtggcgcaccgcttctctctacacagatcaaaccggatccaacgtctctagatccgttttaatcgccggagaatactccgattctaaatactcccacg

SEQ ID NO: 761 - DNA, 487 bp, Arabidopsis thaliana
ctcgttatgctcctggatccatctccgtcgtatctctcccccgtcaagtttcccgccgtggcctctccgttaaatcggggttgatcgagccagacggaggaaaactcatgaacctcgtagtcgaagaatcacggcggcgcgtgatgaaacacgaggcggagacggttccggcaaggatcaagctgaaccgtgtggatctagagtgggtacatgtgcttagcgaaggctgggcaagtcctctcaaaggtttcatgagacagtcagagttcctccaaacacttcattttaactcgttccggctcgaagacggctccgtcgtcaacatgtcggttccgatcgtcctcgctatcgacgacgatcagaagtttcgtatcggggattccaaccaagtcacactcgttgactcggttggtaatcccatcgcgattctcaacgatattgagatttacaagcatcccaaagaagaacgaatcgcgagaacatgggg

SEQ ID NO: 762 - DNA, 487 bp, Arabidopsis thaliana
ccacgcgtccgcgagcttcttcttcttctagggcttccacgcgactacgcctgccaaaatcattctacaggaagcatgaagccagtcttctgtgggaactttgagtatgatgcgcgcgaaggtgacctggaacgactattcaggaaatacggcaaggttgagagggttgatatgaaagctggatgtgtttgataatcttgggacgcctatactcacacctggccatgaatggaccatagggaaatccatctcttatccctcaaaatcagtcactttccatccgcattagcactgccatcttaattgcatttcattcctcatcactttgcacacttggacatgcctctgcaatggagaaggctctctattttcattcatatccccgtctgacttccacattttcagttgttccttgacatattaattccataatgcaagggtttgcttttgtatacatggaagatgaaagggatgcggaagatgccat

SEQ ID NO: 763 - DNA, 487 bp, Arabidopsis thaliana
gcttctgatcttcactttcttcactctagtgtttccgtcaaacggatcttcactgtcttcttccaagcttttacctcgtttccctcgctacactttccagaaccgagaagccagaatccagcagttccggggagatcgaaacgagtatcgatacgagactaagttcttctcacagcagctggaccacttcagcttcgccgatcttcccaaattctctcaacgctacctcatcaattccgatcactggcttggtgcttctgcgcttggacctatcttcctttactgcggcaacgaaggtgatattgaatggtttgctacaaactctggattcatttgggatatcgctcccaagttcggtgccttgcttgttttccccgagcataggtattatggagagtctatgccttatggaagcagggaagaagcttacaagaacgctaccactttatcatatctcactactgagcaagctcttgctgattttgct

SEQ ID NO: 764 - DNA, 487 bp, Arabidopsis thaliana
tgagcacttcctccgcttctcctgcggttttgaggagacaagcttctcctctgcttcacaagcagcaagtgctcggcgtcagctttgcttccgcgctcaaacctggaggaggagctcttcgatttccttcccgccgtccgcttcctcgtcccatcacttgctccgcctctccatcaactgccgaaccagcctccgtagaggtgaagaagaagcagttggataggagggataacgtgaggaatatcgcaatcgttgcacatgttgatcatggcaaaactactttggttgattctatgcttaggcaagctaaggttttccgagataaccaagtcatgcaagagaggatcatggactcaaatgaccttgagcgtgaaagaggaatcactattcttagcaaaaatacctccatcacttacaaaaacactaaagtaaatattatagatactcctggcattctgactttgggggtgaagtggagcgtgtcttg

SEQ ID NO: 765 - DNA, 487 bp, Arabidopsis thaliana
ctttttttttttttttttttttttttttttttttttttaggccaatgctcttcatatatatataacttaagagaccacactggttctctctgtctctctcttttgcattatttaggaactcaaaacacacaacagaaacaaacaaggtttttgtagaaacaaaatcaaacgatttgaaactcatcaaagagagagagagggagataagagataacagaagctgtagagcagcttatgtttctctgtggaggattgattgattaagcatcatcttcaccgagaagtgcgacgagcatcttctcgtaatctccacgagtgtctttggtaatagctttctccaaaggaatgctgttcctgcgctggtactcctctccaatgaccttcaagtcaatctcagctcttgtggtcacaattctagtgagtgctccttcatcagttccagttttgttgattgctgaacgaagaacatcgacaaagtaaagctctg

SEQ ID NO: 766 - DNA, 487 bp, Arabidopsis thaliana
  misc_feature (1)...(487): n = A,T,C or G
tttttttttttaaatagccagagatatacttcaagttcaaatagagttatacagaaatagatatataataagattatgctgcttatggttatgtacatatgaccagaagactcttaaatgagaacaaaaatatgtgtcaaaaaaaaaaaaaatttataattatcttctcttgtttcttcatatacgtcttctgtatcctctgcgtgcataaaatctatattattttatttaaaaanttagaaattagtagggtgaaatcctaagatggaagccttttggtgcaaaaactctcggaaacaccattaattcatcccctcctatttcctcccatctgtatctcgtaacaaagtaatggagaaagctcgagatctcgacaatccctagttccttaccaggacaaagccttgtcccacctccaaacacaaagcatgagttttgtgactccaagctcttcttcatccatctccatggattaaagatcaatggg

SEQ ID NO: 767 - DNA, 487 bp, Arabidopsis thaliana
tttttttttttgcaaactagcaatgagaattcatcaaagaaaaaccaagacaaacagaaaaatgttactaaaatcaacataaaaagatctacgagctaaaaacgaaccaaaataaaaatttgagaaaaaagaacctggttcatcttatgaacgttgacccaaacataatgaagctcgatagaatccaaactcttattaatgttcataagctaacctcttttaatcatatatatatccactaaactcatgattcatcgttagctagctagcaacgattatgagtgtgtgtgtatatttgatcaatacggtggtcgtcccgttgaccaataagactgatcatgttgctgctgcaactgaaccgaaccaagaagattaggtggtaacccttgatgacctgacatagcttgttgctgatgttgcagttgttgtcccatcatcggcggcgactccaatgatcctcctcctcctccgccatgaaccggcgtct

SEQ ID NO: 768 - DNA, 487 bp, Arabidopsis thaliana
ggatcctctagagcggccgcccttttttttttttttttttaggtcttaaaagaacttctagaaagagtgtttcaatttcacaagcgcaaccaacaacgttaacaagctcaacttaagagaaaaaaggactaactattgtcttacaaagtagaaagatgactaaatactatttactgtaaaacttaataaaaggcctttgacacttctctccttattcagctcaattcactgcagcatgctctctgtctagtaccttcttccctgtggaaattggtcagacccgggctggcctgctggattattgttgttccagtctcgattcctctgatctgcctgtgggaatgtctgattctgctcttgtcctggtccagaatacccctgaccatagccaggatttccagctccaggtgcaggacctaagtttccagctccagatgcaggaccaaagtttccagctccctgtggattgtaattcctaggtcctcct

SEQ ID NO: 769 - DNA, 487 bp, Arabidopsis thaliana
tttaattacaaaatgatataacattaataaacaacaaacaaaataaagccgaaaaccaaaataaaaacaagaaaataacgaaaacaataaaaaaaactgcagagaaaaaagccagaagaatagctctcaaattctctcattatcatctctttacaaattcttcctttttttgttactcttaacgcttttttcttcatcgtccgattgtaccgtcactaagatcgacccgccacgtcatttatccacaacaccttaaaaatctctaaaaaatattcacaaaatcagatcgagtcgccacgtcatcaaagactcgatccaagtcgactcaaccgagtgagttctctctactgagtcttgcatacatctccgctctcagctctttcccagattccacaaattccatcgccggagcttcttcgatctcaaactctcttatcctcggccacgttgccgcctgaatcggacgcagagacgacgaaaaaggtaa

SEQ ID NO: 770 - DNA, 487 bp, Arabidopsis thaliana
ccacgcgtccgattttttcggaactgtaattaattggcgggttctggctgttataggtaacgaaatatctcctcgcaagccatttacattttttttctttcaataatagtataatatttatttcaacatgtacatttttgtttatttcaatcttctgtgaagactacatgttagttttattcaagtatatattccggttcaggtgctcttccatgtttcattccagtgatcggtatatatttcataccggaatcaccaagatggttggttggtattttctttatatatttcagatcgactgtgaaatttttcatatgaatatatagagctttcttaaattattttaaatttatttatttattactgtttttaggctaaaatcggttcagttaaagaagtagaaaactctctgcatcgccttagagggaaagatgctgatgtttcagatgaagccgctgaaattcaggttatgacaaaaatgcttgaa

SEQ ID NO: 771 - DNA, 487 bp, Arabidopsis thaliana
  misc_feature (1)...(487): n = A,T,C or G
ccacgcgtccgggagacttcatctcattcgatgcctaaacgttgcaagtgtagagtggttggagtatttcggaaagcttgagactttagaagaactctgtatcaagaactgcagagccattggggaaggtgatttgatcaagctgaggaatagctggcgaaagctgacaagtctgcagtttgaggtagatgccaattacaggtacatgaaggtttacgaccagttagatgtggaacgntggcccaaacagttggttccctgtgacagtctggtggagctcagcctcggtaactgcatcatagctcctggtagagggctcgcttgtgtgctgagaaattgcaagaacctggagaagcttcatctggacatgtgtaccggtgtcagcgactcagacatcatagcattggttcagaaagctagtcacctaagaagcatctcgctccgtgtcccgtccgattttactctgcctctcttaaacaacatcacg

SEQ ID NO: 772 - DNA, 487 bp, Arabidopsis thaliana
ccacgcgtccgggaagaagagcaacgagggcgagagatatcttcttatccatggcggctattgctagtctgcaagcagttaatctcacatttaggcgacgtagcactcgatgtggaattgctgagccgagcggagagccagctccgatggggctgaagactagatacgaggatgggctggtggagagagtgttcatgggtctcttcgcgaggaagatggacaagttcgggtcgaagaagaagaaggacacgaaggagaagggtttttgggagtacgattacgagagcttcgtggaggtgtcaaagagagtgatgcagggacggtccagagtgcagcagcaagaggccgtgagggaggttcttctctctatgctgcctcctggtgctcctgaacagtttaggaaattgttcccaccaacgaaatgggctgcagagttcaatgccgctcttacagtgcctttctttcactggttggttggtccatctca

SEQ ID NO: 773 - DNA, 487 bp, Arabidopsis thaliana
aaaggcaacttaccggaggttccttctcagtacattcagccaccggaagctcgacctaatctccattactccggcgatgcagcttcgatcccaaccgtcgatctctcgagctccgattccgcgagagaagccatcggtgacgcttgtcgcgactggggagccttccacgtaatcaaccatggtgttccaatccatctccttgatcggatgaggtctttaggtctctctttcttccaagactctcccatggaagagaagctacgttacgcctgcgactctacctccgccgcatctgaaggttacggtagccgtatgttgcttggtgctaaagatgacgtcgttttggattggagagattactttgatcatcacacgtttcctccctctcgtcgtaacccttctcattggccgattcatccttctgactacagacaagttgttggagaatatggtgatgagatgaagaaactagctcagatgctattag

SEQ ID NO: 774 - DNA, 487 bp, Arabidopsis thaliana
attcatcagttttaagtcttcttcaagtcccagggatcatcaatccaatggctcagatcttagcagcttctccaacatgtcagatgagagtgcctaaacactcatcagtcattgcatcatcatccaagttatggagctctgttgtgttgaaacagaagaagcagagcaacaacaaagtcagaggctttagagttcttgctctccaatctgataacagtactgtcaatagagttgagactcttctcaatttagacaccaaaccttactctgacaggatcattgctgaatacatttggatcggaggatctggaattgaccttagaagcaagtcaaggactatcgaaaagccggtggaggatccttctgagctacctaagtggaactatgatggttcgagtaccggtcaagcacctggtgaagatagtgaagtgattctatacccgcaagctatcttcagagatcctttccgtggaggcaataacatctt

SEQ ID NO: 775 - DNA, 487 bp, Arabidopsis thaliana
ccttttgctagtgatttctctggtggctgcaacttgtttcttgcaagccaaggcagctggagtttattgtagtaacccttacactcgatgttaccgcaagtacattaggtgtccagaggaatgtccaagcaaaaccgctatgaactccaagaacaaagtttgctacgccgattgcgatagacccacttgcaaatcccaatgccgcatgaggaaaccaaactgcaacagacctggatcagcttgttatgacccgaggttcattggaggagacggcattgtgttctacttccatggaaagagcaatgaagagtttagcctcgtctctgactctgaccttcagatcaatggtaggttcattggtcacagacccgctggtcgtgccagagacttcacatggatccaagctctaggattccttttcaactccaacaaattctctctcgaagccgcgaaaaccgcctcatgggacaacgaaatcgaccatctc

SEQ ID NO: 776 - DNA, 487 bp, Arabidopsis thaliana
tgagctctctatggttggctgcaaatgcattggggcttatgtgaagaacaagaagaatcagaatcagatttgctggatatggcaaaaagtcagcgtggagaatgacaaggatttccagcgtttcttggacaatgttcaatacaagtctagtgggatcttgcgctatgagcgtgtctttggggaaggatatgtgagcactggtggatttgagacaactaaagaatttgtggcgaagatggaccttaaaccgggacagaaagtcctagatgttggttgtggtatcggtggaggtgacttctacatggctgagaatttcgatgttcatgttgttggaatcgatctgtcggtcaacatgatctctttcgcactggagcgggccattggactcaaatgctcagtcgagtttgaagtcgctgattgcaccaccaaaacatatcccgataattcctttgatgtcatttacagccgtgacactattctgcacatc

SEQ ID NO: 777 - DNA, 486 bp, Arabidopsis thaliana
tttttttttttttgacaaaccattttatttcatcgacagtgaagtagtgtacatatgaatacatatatcgaatagatatctcgtatgtgtatgtgtgtgtgtgtgtgtgtgtgtgtgtgtgtgtgtggtgagaaagtgagaggaagattggttacctaatgtaaaaaaacaacaagatgcttcaaaaatgtcttttcgagtgttttaaaagggaaggaaggatgaattgcattagttggttcaagcaagatctcgaggttcaagggctgcgatttctctcaaaacctgacttttgtctgcttcaaacctctcatcctctttgtctggtttcaaatcagccaacaatctcagaagcttgcttctgttggccaccagaatgttgactatatccgcaggcttgttttggttcgctgcaaacagcttaaagacatggaatgcttctatttggatactcttgcttgactctcttagaagattcatgagaat

SEQ ID NO: 778 - DNA, 486 bp, Arabidopsis thaliana
tttttttttacttaagagatacattatgattatgggttttaaataatgtttcttacataataatacttatgtgcttctcctttccacatacctttgtgtttacacttacacatgattacatcaaaacattacatttttgcaaagccagttcactttttcttttctgttgccttttgttgggtttcactcgcaggcaagtttagtgccgaaacttgtgagacagatagcaaaagcctgaaatgcagagagaggctgtctataatccatagtgaaagtgtcatctcccactttaccaaactgtagaagaactgtttcttcatcgcctttaccgctcggttgactttggtcaacggtcgcaaccagctgaaagttcttgaccgaagcaacagtaactcgtccatggaagttcagacaccagcactgcaagtgctcgtgccatctaggagctttgttctttagtattgtcaagctggaaccatccttgtt

SEQ ID NO: 779 - DNA, 486 bp, Arabidopsis thaliana
agctacaccgtttcgatataccgcagcattggcaagctttactgcgcaaatcccgtctttaaggcttatttggtctcgtcttctccgaaacaagcgttggggttttacttcgatatactaagatttggttttgttcctgattcatacaccttcgtttcgttgattagttgtattgagaagacttgttgcgttgattctggtaaaatgtgtcatgggcaagccattaagcatggatgcgatcaagttttgcctgttcaaaattcgttaatgcatatgtatacttgttgtggtgctttggatcttgcaaagaagctgtttgttgaaattcctaagagagatattgtgtcctggaactctataatagctgggatggtgaggaatggtgatgttttggctgcacacaagttgttcgatgaaatgcctgacaaaaacattatttcttggaatatcatgattagtgcttatttgggtgcgaataatcctgga

SEQ ID NO: 780 - DNA, 486 bp, Arabidopsis thaliana
tttctttctattctcctctgcttaatttcccagaaattactctttctgtgcttatcggattcaatagattcttagtaaatcgtaatggagacaccatcatcgacaagaagagtcacgagatctcagacccgctgtgctatcaataatctcttatcctcaaagaaagcggatgattggtcagataaatgtcaatcgaagtcggtacaaagaaacggtgcaaaagacaggtctgcgttgtttgacataaccaacgactcaccgatcgtaggtctggcgatgcagacaccgtcctcaggagttgttgggaagaggaacatgagcagaatcaataacactcctggatctggtgaggctctcttgagaggccaagtcaagactctcttgcagaaggttgaggaagaagcagatctcaccaagatttcgttggaatctcgtcctttcatccatctcgttacttctcccatgggtcttctcgccccaactccg

SEQ ID NO: 781 - DNA, 486 bp, Arabidopsis thaliana
ttctcttaggcctataaccgcaccgccccttgttgaggaaagagttgagactggcatcaaagtaccaccgcttacctcttattcagatgttttcagtgatttgaagaagccggatcatgtattggtttgtgcgcattgtggagaacgttgcgattctcctttctatcaacataacaagggtatagtcaacatatgcgaaaagtgtttcaagaatggaaactatggggagaacaacactgcagatgattttaagttgattgggaattcagctgcagctgtgtggacagaggaagagatcctcctcttgctagaatctgtgctgaaacatggagatgattgggaactcatttcacaaagtgtttctaccaagagtagactagattgcatttctaaactcattgagctcccgtttggagagtttctgatgggttctgcttctggaagactcaatccctctatcctcaccgaggatgaaaacacggaaca

SEQ ID NO: 782 - DNA, 486 bp, Arabidopsis thaliana
cttttttttttttttttttttttttaattaaaatagtgtattttattttcttaaaacataaaccatacatgataatacaaatccatataaactctggagaaagatttgcttatgataatgttcctttggagagttgcgttgttcatgttgctttgtggaagacgcaagtaatgttccaggtcattagggctgcagttattctccttttgtcggcggttgtaaacctcgttggtctaacgttcttactcggtccacatatgtactgttgtttaggtgccgtgaacatgaagtttgccggcatccgagcagtcttaaccgagttaccagcgctaccaacagataactggaatgcactttctgaaccaggttttaagacaccgcttttgcagcaattagcgatctgctgattgaaaggagttccgggaagcaaatcgacaactgttggcttacgaacgcaggactgcgggatatttcctttgaacatgg

SEQ ID NO: 783 - DNA, 486 bp, Arabidopsis thaliana
aaatggactcccaacaaaactcaaatatacaatctaagtcctcactcctcggtgggtcttcaaatttagaaatagaagttgatacacacacacacatacataaaggtaaaaagtaaaaaagttgcaataaaactgccactagagaaggcaacattactacagccaacctgggcagcttttatataacactgagacttttactcatacctctaaatctttttctcccttctcttgtcttcttcttctaatacacagaataatcaggaaaggctaacattgttaatcaatctcccacacaaaccattttgatcttcttcctctttaacctctgggcttgctgtacagttatttttttttagaaggctttaagatcccaaacctgaggaagatcttatatctttgatcggttctttcaaattatcattggatcatccatcgatgataccatctgtgcctctgctgcttccccgcttatcagctccacag

SEQ ID NO: 784 - DNA, 486 bp, Arabidopsis thaliana
  misc_feature (1)...(486): n = A,T,C or G
ctttttttttttttttttttttagagtttactattcctgcaatttcacttcaaagctcaaaacgaaaaacaaacagagtaggttgcaatggagactagctaggattgaattgtatatatatattgatagtaattatttttcaatacaacaaaattacatcgtcggttattatgttcttttggttgcaagatttctctgacgtgtaaggcctgccattctcattgttcctccacctcctccatttttgtcagatcttttacggctacgccaaagaagccgaattggagtcccagcaaagcctgcatcagtgcgtantgtttctccatataccttctgtacgtatccgaaaacagctttgcgtcgtttacaaagaaaacaaacgtcggtggccttattgctgcctgggtgcaatagtaaacgcgacctcgcttgcctccacgggtccttggaggggatttaaatgcaactgcttctcttatcacttgg

SEQ ID NO: 785 - DNA, 486 bp, Arabidopsis thaliana
ccacgcgtccgctctggttctacttgttcctctgttttggattgtggtggctctctaatggcggcggttattggaaacgtggcgttgttacttgacgttaactctcaccgtacggtggtaactgatcggagaattcgtttaacggtggtcgacgtcgttttgaatttacaaaagagagattcgcacagtcacgtttctcattacgctgctctctcttccaataagcctcttgaatctgacggcgaagctcgggttcgccggtttttaactcgcggaaaagcgaattccagagctaacgccgtcgatttcgacgacgcgggatccagcgacgaagaaagtagtgacggaggcggtggtggtggtgacgaggaggaggaggaggaatatttcgatgtggagaaggagaggaagaggagagctaaggaatttcatgatacgaaggagcttgagaggaaagcagaggagttacagtataagattgatgaa

SEQ ID NO: 786 - DNA, 486 bp, Arabidopsis thaliana
ccacgcgtccggcttgcagagttaggaggatgaagctaggaagccaaggccttgaggtatctgcgcaaggccttggctgcatggccctctccgctcgatacggtgctcccaagccggaaactgacgccatcgctctcctccaccatgctattaactccggtgttactttctttgacacctctgacatgtatggtcctgaaaccaacgagttgctcctcggaaaggctctgaaagatggggtgaaggagaaagtggagcttgcgaccaaatttggattctttatagtagagggggaaatttctgaggtaagaggagatcctgagtatgtaagggcagcgtgtgaggctagtttaaagaggctagatattgcctgcattgatctttattatcagcatcgaatcgatactcgtgtccctatcgaaatcactatgagagaactgaagaagctagttgaagagggtaagataaagtatattggtctgtcag

SEQ ID NO: 787 - DNA, 486 bp, Arabidopsis thaliana
ggtgctgctggacagaggacagatttcaaggaatccaacaaaatgcttgaatggaatttaaaaaagattgttggcgggggtgagcatacactgcgtgcaaagcttacattttcacaggaatttcatggtaatatcacaaaggaagcagggccagtcagcatgacgttcacgatacctatgtacaatgtttctaaacttcaggtcaaatacttgcagatagcaaagaaatcaagtagttataatccatatcgttgggtgagatatgtgacacaggcgaattcttatgtggctaggatatgacctgttttcagataatgtttatccttcacttgtatgtctaagtactttctcttttcattttcggatcacacttgcttcacagtactgtgttgaatgttgtctcttctatttggatactttcttgtttcggtatcaacatatatggctatatgcttttattttgaaaaaaaaaaaaaaaaaaaaaaa

SEQ ID NO: 788 - DNA, 486 bp, Arabidopsis thaliana
atccgatatttatattccctctgcccttgaaatcaaatctcttctcgaatttgtgctctagaaattataatctggcaatttgaagatcttgtgggtcacgacacaaacttataagcaagagcttagcattttcatcatctgctgaagaacgtatgggagaaactgttaaagagcgtggtgatggaagtgcagagctggttaaatccgtagctgataagcatgccggtctcgtgagaccagttgctaaatattactctgcagttaaagatgctatggtgtgtgggaaaggaagatatacgcttgtaaaagacgtagacgaggtggaaaatggagtgtatgacaagcctcttccatgctttggttgtggaatcggatggttctcctttctcttgggttttgtgttccctttcttatggtactatgcaacacttttatatttcgggaactactaccgcaaggatcctagagaaagagccggccttgctg

SEQ ID NO: 789 - DNA, 486 bp, Arabidopsis thaliana
ccacgcgtccgcacaactccacgacgagaggaaaaaaaaaactcagagagacaaatctaaatggcgatgattacgcgcaacaccgccacgcgcctccctctcctcctccaatctcaacgcgccgtcgccgctgcctcggtctctcacctccacacatcccttcccgctctctctccctccacatcaccgacttcctacaccagacctggtcctccttcgacctcccctcctcctcctggtctctctaaagcggccgaatttgtgatctccaaggtcgatgatctcatgaactgggctcgtaccggatcgatctggcctatgacctttggtctcgcttgctgcgccgtcgaaatgatgcataccggtgctgctcgctacgatctcgatcgattcggtatcatcttcaggcctagtcctcgccagtctgattgtatgattgtcgccggtactcttaccaataagatggctccggctcttcgcaaggtt

SEQ ID NO: 790 - DNA, 486 bp, Arabidopsis thaliana
  misc_feature (1)...(486): n = A,T,C or G
ttctttttggctcgatttcatttatcgtcaaaatcaacaaaccttacaaaagttatgcatcggggaaaagcttgatccgaataatgtgttacgcatcaacacaaattattactataaccagctagagcaatcagccgatcctcaaatcaaacacaaaagagcagatattcgaaaatgaatccataacgaatgagaacgatgcacgagaaggcatcaaaagttattcaggacgtgacttgacgatgaaattctggcgactgatagggttcatgacgacgggaggaccagcaactcttggccatgcttgtaatctctcttcagtcgcagcaccccattccttgttagtaatagttcctggtgtagtacctccaaaaagcttatcatcagnaataactttgtcacacacgtaagctactaccgcagatcccgcaagggcaccgataatgtatgtagctctcgacatccttaacctgaatcgatttcaca

SEQ ID NO: 791 - DNA, 486 bp, Arabidopsis thaliana
  misc_feature (1)...(486): n = A,T,C or G
ttttttttttttttttttttttttttttttttttttttttttaagagcattcntttattttttaccaaacataacataacaatcaaccatcgacgcaacaaatgttaaacctcttgtactactgaccagatttttcaaagtagcagaagagcaatttataattttaacagacataaactaccaaaccaaaagtcacggcgggctacaacaactaaaagctgtaaaatcatttatatgaacgtgcattccaaaaactcacgnngattccacaccgatttcttcttcacctttcattttttgccccaattttttttttaatctttactcttctcttaaacagcatcatactcaccgtgtgagatggttcagtgacaaaggtttctactggatcggatggtattgagctgatactctctttggaggtagctttcggagaatgaagaggactagtgccgatggaagtacttctaccaccatatagtagat

SEQ ID NO: 792 - DNA, 486 bp, Arabidopsis thaliana
  misc_feature (1)...(486): n = A,T,C or G
ctagagcggccgccctttttttttttttttttttttttttttttttttttctcatagaaaatcagacactgaataatttgttgacttttgtcgagattctggcaatgcttttagcagtatacattcatctgaacacaatggccgagcattctcatggccaactttctattaaactcaatccatagaggtttgaataaagaagaaagaattcactaaactttgagtttgagcagcacaagaccttatgaatgaggatgaagctgaannnttcccatatgttcggggaagctgtatgagctttcagtggtttccatctgcggacgccttttcgaatattttatgcccacaccagtccatcaaagccgatttccagatttgacacagggctgtctccaataccttggtcaagcgcttgggtgtcatctattggatcaacatatggctcgagcagatcagcggatctttccgagggaattccataatctt

SEQ ID NO: 793 - DNA, 486 bp, Arabidopsis thaliana
ttgcctaagaagaagcttttgtctcaggaaaggttacataagctgcagtgcggtgcttgttctgaagttattagtttcacaatcgttgataggaaactcgttttctcttctggtaatgaggaaacaaaaccggtctctctagaggttgaagatagaaacacaacaaacacagtagtgatagaggaggaagtctcttctgttgatttcaacagctcaggtagagatattccacgtaaggatgaagaagaaccagtgcaagaactgagaaatcatcaggatactattactacgcaaagcgtccgctctgaatctcaacactcagatgatgaagaaagatcgagcaattctagtgaacaacaacagaaggaggtcaaatctgttcgtcggcgaggtaaagggtcaaaagcacctgaacccgctgctcctgataatgccagtctccttgaactttttgagtattctaatgtaaacagagctgcactcgct

SEQ ID NO: 794 - DNA, 486 bp, Arabidopsis thaliana
  misc_feature (1)...(486): n = A,T,C or G
aaaaaacattacaaagacgacaaacataaactctataaaagcctcttctagtagttcacagatgaggtttgcctgtttccattttcttcttcagcttcatccccttcttatgaaccgtctgagtctgcgttggctccacgagaagtaaccgcgacatcacatacgccaaaagctcttcacggtgagagaaggtaaaatccaaatgagcatactcaaactcattgtaagaaacatctactcctgaatctctcatcaccctgtaatgtttcctaaccattgaaggtctaatcactttgtctttctttccagctactaaatccacaggcacatcgatcaacccataaaactccccaagatcgagcggctcaggggacccgtaaacatccatattagctgnnntgctaccgtaatcaaacatcttgaacttaccgctatgtttaatctgtgcaagatgctgagccacacggaaggatatacctggcatat

SEQ ID NO: 795 - DNA, 486 bp, Arabidopsis thaliana
gattattatgtggggattgttttgaggtagagctagacaagattcttgaagaggatgccccttttgatatctgcagttgccagtttgctatgcattactcatggactactgaggcacgtgcacgacgagctttggcaaatgtttcagctttacttcgtccaggaggtgtctttatcggaacaatgccagatgccaatgttattataaaaaaactcagagaagctgaaggtttggagattggtaatagtgtttactggattcgttttggtgaagagtattcccaaaagaagttcaaatctagcagcccatttggtatcgaatacgtgtttcatctcgaggatgctgttgattgtcctgaatggattgtgccctttaacgtcttcaagtctttagcggaggagtatgatttagagttggtatttgtgaagaactcccacgagtttgtccatgagtatatgaaaaagccagagtttgtcgaactcatga

SEQ ID NO: 796 - DNA, 485 bp, Arabidopsis thaliana
ctttttttttttttttaaaccaacacttctcttaccactcaagaatcgatacattcattaatattttactaacattatacaagtagagtggcgaaagcttttacaagaaacacataacgtgcatagaattctgaggttataaactcattgctctgctttaatcagcttttgccatgtcctatactgattgatgtagtaaaatgtgttgtagatggttagtattttaggacttctccctcattttggctctagcaaatacaactccagcgacaagaccaaagagtatgcttgctgagttctgcaaactggtcggtacattgaaaagaacgatccccgcgatggatagaggtatcttgtttagagatcccaccaggctgtatgttgttgctccagtttgatgaagaaaccacattgaagtaaagctaatggcaagccctagaagtccactaagtgtcatgaccatccagaaacttgcggacgcgtgg

SEQ ID NO: 797 - DNA, 485 bp, Arabidopsis thaliana
  misc_feature (1)...(485): n = A,T,C or G
tcgagcggccgcccgggcaggtacgggcattgaccttgtcgcagattttcctctctagtctccgtcttctattaccagatcgagctttgttcttcgagcttctcatctctttgttcaatctcaaaggttcttgctgtttttcatttacaggtttttgagtatcagcaaagatgggtgacaatcttatggacaaagttaccgcatttggtgagcgcctgaagatcggaggttcggaagtgagcaacaagatcagtgctggtgtgagctcaatgagctttaaagtgaaggaactttttcaaggtccaaacccaactgataaaatagtcgaagatgctactactgagaatctagaggaacctgactgggatatgaatttggaaatttgtgatatgataaatcaagagannnnnaatagcgttgagttgatccgtggtataaagaagaggattatgatgaagcagccgaggattcagtacctcggccgc

SEQ ID NO: 798 - DNA, 485 bp, Arabidopsis thaliana
  misc_feature (1)...(485): n = A,T,C or G
tggcgcgccggtcgcaaccgcgcgccaaaaagcggccgcccgggcaggtacctatacgagattctgaccaatgcgaatgttgtcaagaagaagattccntcctcctttgctgtaacaagaccgataaactcactgcacacaccaaggagtttatccggaagcaaatggagaaagaaattgagaaactgagggcttcaaggagtgcagtctctactgctgatatagcgaatgacttcaccattggaattgagggagaagtgttctccttcacgcattgctccaacaaagtcactgtcgctgaggcatctggacttaccggagaaaccatccagattgaagacttcattcgagaatacatcaagccatgagctccaacatgccttcatagattgaatctaccacaagtttcttatgctttgggctgtgactttgatttgagtttagagatccttttgtatatgagatctttggatgatttagggtgt

SEQ ID NO: 799 - DNA, 485 bp, Arabidopsis thaliana
ccacgcgtccgctctctgctccatttctctcactttcttcacatctctgaagctcttcgtcacgcatctacaatggcatcgatgatgcaaccgcagatcatactgctgaaggaagggacggacacatctcagggcaaagcgcaactagtaagcaacatcaacgcttgcactgctgttggagatgtagttcgaaccacgctcgggccacgagggatggacaaactcattcacgacgataaaggatccgtcaccatttctaacgatggtgctaccatcatgaagctcctcgacattgttcatcctgctgctaagatcctcgtcgatatcgccaaatcccaagactccgaggtgggtgatgggacaactacagtggttcttcttgcagcagagtttttgaaggaagcgaagccatttattgaggatggtgttcacgctcagaatctaattaggagttaccgcactgcaagcactttggcaattgccaa

SEQ ID NO: 800 - DNA, 485 bp, Arabidopsis thaliana
  misc_feature (1)...(485): n = A,T,C or G
cccaagcaaaaagctccaaggaagcagctcaagtcctataaactcaaacacatcaacaagagtattcaagagggagatgctgtgttgatgcggtcgtcggagcctggaaaaccgtcgtacgtagcgagggtagaggcgatcgagacggacgcgcgtggatcgcacgcgaaagttcgtgtgaggtggtattatcgccctgaggaatctatcggagggaggagacaattccatggagccaaggaggtttttctctctgaccacttcgattttcaaagcgccgatacgattgaaggaaagtgtaaggttcacagtttcagtagctacaccaaacttgactctgttggaaacgacgacttcttctgtcgtttcgagtacaattccactaccggcgcgtttgatcctgacagagtcaccgtgttctgcnagtgtgagatgccgtataacccagatgacttgatggtgcaatgcgaggagtgttctgagtg

SEQ ID NO: 801 - DNA, 485 bp, Arabidopsis thaliana
  misc_feature (1)...(485): n = A,T,C or G
gagaagaatatgacgacggaggcgaattctacggcggaggagggttatagtgtacagagagacttttggcgtcaagcggcgaaatccgatggtttcgatttagagaacatctcacttccaccaggtacgaatggaattgtcatgggactgattccctacgactgtcaacgtgcaaggcattatccgtttcctgtcttggtcaaactttatgctaagtttgggcttcatcgttacaatatgttgaaggggacaagcttccagctcgctaccctaatgaaattcaacatgttaccgaactatatttcctctttctacatgactctgcttgcacatgatcccgatccagctgctggctcatcgcagaaaacctttcannttcgagttgatgaacaacaatttggcagtttggatataaactgctccattgctagacctaaacacgaaggtgacttacttgaagtgtccaccgagacgcccttcatgcc

SEQ ID NO: 802 - DNA, 485 bp, Arabidopsis thaliana
cggccgcgcggccgcggaacaagaacaaagaattagctttctcacccagaacctgattatcaatcgactacaacaatgcattagaccgtggtcatttgtctaagtgcgtcatcaggcagcaaaactctaaacactgcataatgatggttcaaactcttttccccttgaagtctatgaacactcccgagaccacctgccgtggtgtttggaaaagcatagaaaatccgttttattctttgatgcacaagcgccatagcacacattgtacaaggctccaacaggaggaaaatgtcataaccagtgcagaggtacggcctttccattgaaggatctctaacagtctcttctctgctgtcattttggacgtctggactctgactgcttgttttctgctttttagccggagaatctgtatttgagggcggaacatgatcctgatcaaaaatcttggatggattgggaaacagatttctatctctggcaga

SEQ ID NO: 803 - DNA, 485 bp, Arabidopsis thaliana
gcggccgcttctaatgttacaagctaacaacagagattatgagagtgaggtcagtttgcaagatatcaaaaatggctgaattgtcccaacaataactcaaacatgtcgtcgggggttagaagtgtcgttcctccaataaccaagttaatgtctggtcttccgctctctgacacagcctcttgagcttccaaaacctctataccgttgatacctccaatgacaaagacaagaatgacactctggtctgccaggcttggttttgcctgaccaagaccaaaccttccaaatccgcttttaataaatcttccaacagttgaagaatggtattctaaaccgggtatctcttgtttgctcaacacttttgttataagcctgtagactagccctttgtttccagaaggctcgccaggaaagctgctctctgaagccaatgagccttctcttaatggtagattccttgttcttagactcgataacttgtggag

SEQ ID NO: 804 - DNA, 485 bp, Arabidopsis thaliana
gtgttgaggaattttacaggatgcaacacattcaccagacctatgactttgtgaagaagatgaggaaagagtatggaaaacttaacaagatggaaatgagtatatgggaatgttgtgagttattgaacaatgttgttgatgaaagcgatccggatcttgatgagcctcaaattcaacaccttctccaaaccgctgaagccattcgaagggactatcccgacgaagattggctccatctcactgccctaatccatgatcttggcaaggttctccttctgccagaattcggtggtcttccccagtgggctgtcgttggcgatacatttccagttggatgtaccttcgactcagccaatattcaccacaagtatttcaaaggaaaccatgatatcaacaacccaaagtacaacacaaaaaatggagtttacactgaaggatgtggtttagacaatgttctcatgtcatggggtcatgacgactacatg

SEQ ID NO: 805 - DNA, 485 bp, Arabidopsis thaliana
ggccgctcttactcaaggttcttctttgtcatcttgttgccgaatccacaaagaggagaataaagattcgacctttattagatattaacgactctggatttttgggtttttggagttggatccacatgggttcttatccggatggattccctggatccatggacgagttggatttcaataaggactttgatttgcctccctcctcaaaccaaaccttaggtttagctaatgggttctatttagatgacttagatttctcatccttggatcctccagaggcatatccctcccagaacaacaacaacaacaacatcaacaacaaagctgtagcaggagatctgttatcatcttcatctgatgacgctgatttctctgattctgttttgaagtatataagccaagttcttatggaagaggatatggaagagaagccttgtatgtttcatgacgctttggctcttcaagctgctgagaaatctctctat

SEQ ID NO: 806 - DNA, 485 bp, Arabidopsis thaliana
cctttttttttttttttttatagaaaagatagaggcattacaagaaaaacacaaaactggagataagattcagatgttttctctgatgataaacaagattcaaagtttctttataaactattgaggaatataagattacaatatacgagtctcacaagataaaagttaacgttcattagaacagtatcacggttgcacaaacttggctaataaggccaggtccagaatcttgacgtcaagattatcatctatcttaacgataccgtcagacccgtcgattccgatcagcttacctgtagacccacgatactgaccgccaactattttgacacgatcggatttcctcggaggaattatctccagttcgcttgggagggccattatagtgtcaccttcaccgctggacccgagagacactttacacgttccatccgaaacatctcggatgacgcccacatcggtgtcctctccagccttgtgtatgt

SEQ ID NO: 807 - DNA, 485 bp, Arabidopsis thaliana
ggtcgcggccgaggtacctctgccatgcccttctcacaatctccgaaccgtctatatgcggaggcaccataactgctgtcactgtgttacttatccattcctccttctgtgtgcagtttttcagcccccatgcttccaccgcaagcctggtggcctttcccaaacgagcatggcgggcgatgatgttctcaagtccttcctcaaagataagatcaagagcagctctaagaccgtagagaagttgaatggaaggtgtgtatggccaataggttcctagcttgtaaaacttaaggtagtcattccagtcaaagaatactttgagagatttagaagttttggtagcttccaaagctttaggactggcgcagacaataccaagtcctgttggaagagataaggctttctgagagccagtcaaggccacgtccactccccactcatccattcggaaatcaagcgcgcagatggacgaaacaccgtccact

SEQ ID NO: 808 - DNA, 485 bp, Arabidopsis thaliana
  misc_feature (1)...(485): n = A,T,C or G
tttttttttaaagaaaagattccattcctcgaaagtgtttatttgttatgcagtattcaacaatctgagtgaacaagattttatgtactataagctgaggaatagcagtttacgagttctcaccgagatgagatgaccccgaggccgatgcggatgacgaagaggatgaagagaataatccgctgaacggccatggaaaagagaaccttctctcgctcacattactgttccttgcatcatcttccacattctcattacttacgttgatctctagagttcttgttctcggtcttacaggattaaccttggtctcatcatcaggagggagttcatatcggcacacgggacatgaactgtgaagctcgagccacggtactatacaccggatgtgnnnnnngtgcttacacggcatctctttagcttcacttcctttgtcaaaatcatccaaacaaatcgagcactgcaatgattcacttatcttaacc

SEQ ID NO: 809 - DNA, 485 bp, Arabidopsis thaliana
tcatgattagcttaagctccttcatcttcttctccaattcccgggttttttcttcttcctccgataaccggaaaattcacctctatcgaatttcccaagcatcttgatccaccaagttcatcttaaaatttcttctctttttctcaattgaagaaggtgaagcagccaacaagttactgcaactgtttccacgatttttgcttttttcaagattcccgccgtcgggagttttctcggtgagatcatttcgctccgacggaaaattcaagttgcatatctgatcggagattgaaaagtgttggttcacgcagtatcgattcgtttgtttttgatgccagatctgatatattacttcaccgaagattcaggaactctttcttaggttgaattagcttgagtttagcttcgaattttatctttgatctagctaaagaaacagagagttttcagaggaagaagaaacagagagttttcagaggaagaag

SEQ ID NO: 810 - DNA, 485 bp, Arabidopsis thaliana
  misc_feature (1)...(485): n = A,T,C or G
atttgctcttttattaaatcgaaagaaatgcaaatagtgaaggagacggataaaaaaaggtttgagagtagtaaagatcctcaagaacaaaggatatacataaangtcttgttagcttaaatagatttgtggcaatgcgacattattctcctctcccaatatgttgttggtcgactcattcaagaaggcgcttgtacttgcaccacccgatggcaccaacgtagaggcatatactgccgatagaacctccaatcacagtccaaatgaatctacttggaccatgtttattatccgtgaacaactctatggttatattcataccaaatacaccagcaactgcgataaaggcgctcatcaccagagtagctgttgttagcatcacacccatctgcagaagatgattctgcttgtcatctagcattatgttgatgtagtcctccgtgtcatccacatattcccttagtgttgatagtttgttcagtata

SEQ ID NO: 811 - DNA, 485 bp, Arabidopsis thaliana
ccacgcgtccggactgatatgcgacagaggatccaacgtcgcgactgaaacctagatcccaattctccgtttccaccactgtctctcctccgtcgttagggtttctcaggttcacatctgttggaaacttattgcaactcctaaaggcatttcacatatttgcttttatgcgtacgaggcttgggggatatttatataatccgaaataactcttttcttatcatggagactctgtggactcttttgtatttgctagaacctgctccagctactctcattgtcacagctgtcaccgtgacatttgcatccgctttccgtgcacttaactacgggaaagagatggagagaaaccgtgacttctctgaagcatccataacactagatagctctcaggccttgatgatcccagttatgagctcttgcagtttgcttctcatgttctatttgttctcttctgtttctcagctcctgaccgcgtttacagc

SEQ ID NO: 812 - DNA, 485 bp, Arabidopsis thaliana
ctttttttttttttttacaactttaaaatgaaattcagtatgccccattaaacgagattctttgcatcttccaagcaactaatttaaacagagaatgtcacacacacgagtttggataataaaaaacaaaattaaaacaataactagaagttgtaatgtatttaagaacaatattctgtcaaaataacattgagaagcaactagttcttaaacccgagtacgattcaaaaggtggtaaggactctctagatggtatcaaaacacgagtaacagagtaaacctctacggagatacaaagagccttttcacttaaagcatttggcgtccaaaagagcctcgccttcaaatggctcagcgtcttcaatcatctggctaacacgctccttctgtgcttcatcggagatatcaaccttagtccactcgtacagctccatgtcgtacacctcatccattatgaacttggggatctctggtccacggaaaag

SEQ ID NO: 813 - DNA, 485 bp, Arabidopsis thaliana
agtttgtgattaaccatccagatgagtatcttgtatccgttgagggttggtatgaaaccgtcatgctaggaatccagttcaaaaccaacttgaacacttatgagatcaaaatgtatgatttcactcctagtactgatactaaatttactcttcaagttcaagacaagaagatcattggatttcacggtttcgccggcgagtatctcaattccattggagcttatttcgttccaaaatcctccaccactcctgttccttcaacccctttgaagctgaccgcagaaggtggtgagacaggaactgtatgggacgatggttctcacgatgatgttaagaaagtttatgtaggacaaggccaagatggtgttgcagctgtcaagtttgaatacaaaaatggttctcaggttgtttttggagatgaacgtggaacgagaacactgctaggattcgaagagtttgagcttgaatcagacgaatatataaca

SEQ ID NO: 814 - DNA, 485 bp, Arabidopsis thaliana
cggaccagcaaagacttattttcgctggtaagcagcttgaagatggaaggactcttgctgactacaatatccaaaaggagtctactcttcaccttgtccttcgtctccgtggtggtatgcaaatctttgtgaagactctcacgggtaaaacaatcacccttgaggttgagagctcagacaccattgacaatgtcaaagctaagatccaagataaagagggaatcccaccggaccagcagaggcttatctttgccggtaagcagctagaggatggtcgcactcttgctgattacaacatccaaaaagagtcaacccttcatttggtgcttcgtctgagaggtggtatgcagatttttgtgaagaccttaactggcaagactatcactttggaggttgagagctcagacacaatcgataatgtcaaggcaaagattcaagacaaggaagggattccaccagatcagcagagactcatatttgctgga

SEQ ID NO: 815 - DNA, 485 bp, Arabidopsis thaliana
ggtcgcggccgaggtacaaccatatgcacaaaaaggaaggttgatttggtcaaatcagaataaaactattcacttaatccacgcgcccactaaacacagtgccacatgttccttcctttgagcttcattatcaacgcagtcgtagacggagggagaatttggatgggtgggtttatcaaagatgttggagccgatggctctagtggcgaggttgcttcccggattaaagacgctcctccacacgttatccttacgtggcgtcgtcggagtggttggagtcgttggagttccagggctcactgccgccggcatggtcaacgacctatgcatcaccaccttactgctgctcccttctcctatatctcggatattaatgggttgggtggtgatcttacggaggcggccaaggccacggtcaggctgaggtccagccacaacatcatcccaaagcttctctagcagaaccatctctttttttttttttt

SEQ ID NO: 816 - DNA, 485 bp, Arabidopsis thaliana
ccacgcgtccgactactaataaaccatgaagcttcttatgctcgcctttgtttttctattagctttggcgacttgtaaaggtgacgagtttgtttgtgaagagaacgagccattcacatgtaaccaaactaaacttttcaacagtggcaatttcgaaaaaggcttcatcttcggtgttgcatcttctgcttaccaggtggaaggcggtagaggccgtggacttaacgtttgggatagcttcactcaccgattcccagagaaaggtggagctgatttgggaaatggagacactacttgtgactcatatactctttggcagaaagatatagacgtgatggacgagctcaactctactggctacagattctccattgcgtggtcaagactccttccaaaaggaaagaggagcaggggagtgaacccaggagctattaagtactacaacggtctcatagatggcctcgtcgcaaagaatatgacgccct

SEQ ID NO: 817 - DNA, 485 bp, Arabidopsis thaliana
ttttttttttttattttatgttggttttatttaatgccaaaccagaaataaaccagagttatttctaccaagctcggtacaatccggttcggccttatactttaatatatttcttataccaaaccggtgctgtgtcctatggaaatcacaagatacaaagaatctaattataccagaacctaatcaagtttcaaaccggttcaagcatagaggtttcttccacagcgatcacactcggttatatgagaaaccggagttttaccggaattgattttcagcagatttggaagatcgagctcgaggacatcgtgaagagcctcagatccttctcggagttcatcagagcttatagagagtggtggagttaaccggacaatagtgttgtgagtaggtttagccaagactcctctctccttcaagctcaagcaaatatcgtaagctgaaaccggggacaagctttcgctattgaactcaatcgcattaaa

SEQ ID NO: 818 - DNA, 485 bp, Arabidopsis thaliana
tctagagcggccgcccttttttttttttttttttttttcaagttctccaaaaccagtgtaccaaaactcaaaaagcaagagattgttctgcaaagccaataaggaccaccaaaaaagaaaaaaccagaaatgaactatacacaaatgtggaactactagaactaggtcctggtttaaagctactacggtttctggttatctaatcagttcagtggtttgttcggtttgcccggtccccaaatacggatggtttggtcatcactagcagaggctagcatccgaggatttttcgggttccagcttacacagtttacggtcatcgaatgacctgataacacttcaagcggctttgtgttctttagattccatatgtaaacctgtgaatcctcacttccactggcgatgaacgaactatccaacccaccaaaacatgaccgtatcacgtatttgctctgcctgtgacccgagaacttcaatggttgttt

SEQ ID NO: 819 - DNA, 485 bp, Arabidopsis thaliana
aattgtaccaaattctctctattcttcttctctttcattttagatattttctcttacgcagactcattgctttcctctctccatggaagctactgagttatgatccttaccctcaccggtctttaactatgcttagaaacaaacctagagcagccgtgacgactaagaaacaaacatctctgttaatggctgatcaacctccacctccaaagcctgacacttgccactgctcaccatctctctttagctctcccaagtttaggtttttcacttctaagatgatgatgactccctttgactctgatttctcactcgttagccctacgtctatactcgaagctaacccatccatcttctcctccaaaaaccctaaacccgtttcctatttcgagccaactatccctaatccccagcgttttcactctccagacgtctttggcctagccgatctcgtgaaagacggagacagtaacagagaccactct

SEQ ID NO: 820 - DNA, 485 bp, Arabidopsis thaliana
tagtagcaaatgacaacggaacagatcaggtaaacggaaaccgtaccgggaaagataacgaagaacacgacggctccaccggttctaacctaagcaatttcctatggcacggtggctctgtctgggacgcttggttcagctgcgcatctaaccaagtggctcaagtgttattgacattaccgtactcgtttagtcaactaggaatgttatcaggaatagtacttcagatcttctatggtttactaggaagctggactgcttatctcatctctgttctctacgtcgaatacagagctcgtaaagaaaaagaaggcaaaagcttcaaaaaccacgtcattcagtggtttgaagtacttgatggattacttggttcatactggaaagcactaggactcgcatttaattgcactttcctcttgtttggatctgttatccaactcattgcttgtgccagtaacatttattacataaacgatcatctggac

SEQ ID NO: 821 - DNA, 485 bp, Arabidopsis thaliana
taggttaaggttgattgaggaaggagtaagtgagttagctattcaggactgtgagcaaattatgaagtctgagttctcagcacttcagagccagctggtgcttcttaaacagaagcagtggcttctcattgatactcttaggcagttggagacagaaaaggtagatcttgagaacacagttgtagatgaaagtcaaagacaggctgataatggatgttccggtgaattaagacacgagaagttcagtgaaggcactgccactgagtctgatgatgataatgaacgaggtgatgccgccgaggaggaatttgatgaggaagaaaataccttttttgatacacgtgattttctttcttcaagttctttcaagagtagtggttctggttttcgtacatcatcattttcgtccgatgaagatggctttgagtctgaagatgatattgatccttccatcaagtctattggatgcaattatcctcgcgtca

SEQ ID NO: 822 - DNA, 485 bp, Arabidopsis thaliana
aatgacttacgcgtggttatggacgcttctcgcctttgttctgacatggatggtttttcacctcatcaagatgaagaaggcggcaaccggagatttagaggccgaggcagaagcaagaagagatggtgcaacggatgtcatcattgttggggcgggtgttgcaggcgcttctcttgcttatgctttagctaaggatggacgacgagtacatgtgatagagagggacttaaaagagccacaaagattcatgggagagctgatgcaagcgggaggtcgcttcatgttagcccagcttggcctcgaagattgtttggaggacatagacgcacaagaagcgaagtccttggcaatatacaaggatggaaaacacgcgacattgccttttccagatgacaagagttttcctcatgagccagtaggtagactcttacgtaatggtcggctggtacaacgtttacgccaaaaagcagcttctcttagcaatg

SEQ ID NO: 823 - DNA, 484 bp, Arabidopsis thaliana
  misc_feature (1)...(484): n = A,T,C or G
ttgtgaaaacacactcatttataaacaaacaacaatacttaatgattctgtagatatgtgtatgtatgnnaannnttcatacaacgaagaattataaaccagtttacgtctaattacatgattaccataatnnattgataaccatttttatacacttcattattaaatcttctcccttcatctccactttacattagcactaagcaaactcaaccacggatcgaaccgccaatccgagcttcctcggggtggaaaacatcggtaatagacaccgttgagcagaaactaacaactttatgaaacttattaaccggagaaggcaaacaaggaactcttctccaactacatatcccattctcaccaccaccaatctcacaaacacaagctggaaatttcttatgacaatcatcattaaacacataaacaagattcccagagccagcacatttcaaactcctaaacttgtcatcctccggacgcgtgg

SEQ ID NO: 824 - DNA, 484 bp, Arabidopsis thaliana
  misc_feature (1)...(484): n = A,T,C or G
cttattcactcaaaaacacagttgcattagattttaaaccatactacaaacagattaccataaatccatgaaaatgtatttggcatgaatttcaaaacataagagaacaaaaacaaagagcagaataacggaagattannaacccggcttgagaaatggtcggaaaaaccctggcggtgcttcttctctgaaaaatgatcaactttgaactcagaagcacttcctgtgaacaatcgatggacctgactcgtcatactctgcctttgcgatccacatctgctgnnnnntactgagggaggccaagatggaccctccaatccagacagagtatttcctctctggaggggcaacgactttgatcttcatgctgcttggagccaaagcagtgatctctttgctcattctgtcggcgattccagggaacattgtggttccaccactgagcacaatgttaccgtacaagtccttcctgatgtcgacatca

SEQ ID NO: 825 - DNA, 484 bp, Arabidopsis thaliana
ccaagacattgcctcctcctggcacttatctttcgaaaatggaccaagctgctcgagctgcaatagctgcacagggtggtccaaatcaagcaaataatactcctctgcctgatattggtcttcccgatggtggtgttcctcaacagtatcctcaacaaacaagtcaacaacctggtgcgccatttcagactgttggacttcctgacggcggtgttcgtcaacagtatcctggtcagaaccaggtgccatctcaggttcccgtttctacacagcctcttgatcttagcgttcttggagttccaaataccggcgattctggtaagcctcctggacaacctcaatcgcctcctgcatcagttcgtcctggacaggttccacgtggagctgcagctccggtttgtttcaagactggacttgcccatcttgaacaaaaccagcttccagatgcactgtcttgctttgacgaagcattcttggctctggc

SEQ ID NO: 826 - DNA, 484 bp, Arabidopsis thaliana
caaatcatctccacactcgccaaatcgttgtgtcctcgttcatatcgttatcgtatcagctcaaaaatctcaatctctcttccttacattcttctgtttctcgaatccttgtctccctccatggcttcctgtagcctaggagttcctaaaattaaaatctcggcagtagaccttagtagagtaagatctggaagcttactgataccatacaatcaaagatcattgcttcgacaaaggccagtgaagtacttgagtctgaagacaacatttggatctgtgaaagctgtccaagtgtctactgtcccaactgcagaaacatcagctactatagaagtaaaagattctaaagagatcaagtcatctcgattaaacgctcagcttgttcccaagccttctgaggtggaagcccttgtaactgaaatatgcgattcttcatcaattgcagagtttgaactgaaactggggggtttccgactatatgtag

SEQ ID NO: 827 - DNA, 484 bp, Arabidopsis thaliana
cagttttgaaaagcaaataactaatcaccggaagatgattatgacggcgggagttccaccggagaagcttaagaagtgtctatatacaattaatattggaagcaatgattatctcaacaactatttcatgccggctccctacactaccaatgaaaatttcagtttcgatgaatatgctgattttctcattcaaagttatcgctcttatttgaagtcattgtacgtcttaggagcaaggaaggtagcggtctttggggtgagtaagcttgggtgcacgccgcggatgatcgcctcccatggtggaggtaaaggctgcgctactgaagtgaacaaagctgtcgaacctttcaacaagaaacttaaagatctcatctctgaattcaacagaatcagtgttgttgatcatgctaagttcacctttgttgatcttttcagcagccaaaatcctattgagtatttcattttaggatttacggtaacagac

SEQ ID NO: 828 - DNA, 484 bp, Arabidopsis thaliana
acaaggagatcatcagcagcataagaaagaagaagaagctttgccaccgggtttcagatttcatccgacggatgaggagctaatctcatattacttggttaataagattgccgatcaaaacttcaccgggaaagcaatcgctgacgttgatcttaacaagtccgagccatgggagcttcctgagaaggcgaaaatgggaggaaaagaatggtacttttttagcctccgggaccggaagtacccgacgggagtgaggacgaatagggcgacgaatacaggatattggaaaaccacaggaaaagacaaagagatattcaatagcacaacctcggagttggtcgggatgaagaagactttggtcttttacagaggacgagctcctcgtggggagaagacttgttgggtcatgcatgagtatcgacttcactccaagtcctcatatagaacctccaagcaagacgagtgggtagtgtgtagagtgttc

SEQ ID NO: 829 - DNA, 484 bp, Arabidopsis thaliana
  misc_feature (1)...(484): n = A,T,C or G
gattttgattttggtgaaccaggaaagtggtactcgatctgtggtttgttgattctgaattagtatattcctggaaaattctgttcagtttcataatttaaacaagatgcagctcaaagtccctgaacatcaggttgcaggacacattgctaaagacgggaagcctggtcctctcgtagatgacaagggtcggttcttcaagccacttcagggcgattctcgtggtgaaatcgaggtaaagttctacgaatctttctcctcaaacacagaggttccagaacacatccatagatatttcccggtgtatcacggcactcaagcagttgaaggttctgatggagcagccatgatggtgttggaaaatcttcttgcagaatacacaaaaccatcagtaatggatgttaagatgggttcgagnnnatggtatcctgatgcatctgaagaatacatccaaaaatgtttgaagaaagacacgggtaccaca

SEQ ID NO: 830 - DNA, 484 bp, Arabidopsis thaliana
acatgtctctatttccctgatctggaggtccgagacaatgctaggatatatctgaggatgctggtctgtataccaggacagagaattaagaacattttgaagccggcagatgctgtcactccatcaacccattcttctacattttttagtgttcaaagtcctcgttttcgtcatgatcctagtaaatctcggaacctttcatcctatattcatcttgaacgggttacgcccctactcgtgaaacagtcatggtcattgtctctaccatctctaagtgttggaactgatggatatagcattatagaaaacaaaatccaggtagatgaagttgagccggatggcagtcaagaacttcagattttgccagaagctcgaagaattgaatcaggaaaacctacgttaagggtaatggactcaaagattgcagagattctagaaagattaagaagatatttctctgtgattcctgatttcaaacacatgc

SEQ ID NO: 831 - DNA, 484 bp, Arabidopsis thaliana
  misc_feature (1)...(484): n = A,T,C or G
tccttgtcggagatgttactctcaatccgacccgatattcgacccgagaaaatccaagacctatgccacaatcccctgttcttcacctcactgccgccgattagactccgccggatgcaacacccgtcgtaagacttgtctctaccaagtctcttacggagatggttctttcaccgtcggcgatttctccaccgaaacgctaactttccggcgaaatcgcgttaaaggcgttgctctcggatgtggccacgacaacgaaggtctcttcgtcggagccgccggtttattaggactcggtaaaggtaaattatcgttccccggtcaaaccggtcaccggtttaatcagaaattctcttactgtttagtcgacagatccgcttcttcgaaaccnnnnncnntcgtcttcggaaacgccgccgtttcacgaatcgcgagattcacgccacttttgtcaaacccaaaactcgacactttctactacgtc

SEQ ID NO: 832 - DNA, 484 bp, Arabidopsis thaliana
gatctgtatttcttctctttcagtttcatgctctctgagattttggtttaatatttgatgggaacatcatctggttcgaatcatcctcaccaaatgttaccaccacgtcaacaacaacgaagtggaggaggacttgaaacagctctttcactagtctcttcagatcaagagccgcgtcgcgagtctccagcggagagtgcgagttctcaagaaacatggccactaggagacactgttgctgggaagaagtcaatgagtcaaaagacagagcctgattctatggaacaaactgtgaatgtgatgcaccatgtttcgaatgcggacaaggtatcggtacgggatatcgctagggaaagagttgagttagttgcagagagaatgcatcgattaccggatgagtttcttgacgagttaaagaacggtcttaagtctatccttgaagggaatgtagcgcagagtgttgatgagttcatgttcttgcaga

SEQ ID NO: 833 - DNA, 484 bp, Arabidopsis thaliana
tccccttgctctctgggtttttgctcagtgtgctacgtgagagatagagagatggaaggtctgattcaaaccagaggaattctctctttacccgcgaagcccatcggagtgagaaggcttctccaaccctcacatggcttaaagcaaagacttttcaccacaaacttacctgccttgtccttatcctctaatggtcacaagaaatttcaagcctttcagcaaatcccacttgggatttcggtttcccacaaggagagaagcagaggattcatctgcaaggcggaagctgcggcggccggaggcggaaatgtgttcgacgaaggagacacagcggcgatggcggtgtcgcctaagattttcggtgtggaggttacgactctgaagaagattgttcctttagggctaatgttcttttgcatccttttcaattacacaatccttagggacacgaaggatgttttggtggtgacggctaaaggaagtt

SEQ ID NO: 834 - DNA, 484 bp, Arabidopsis thaliana
taataataatatattgtaacaaaagcttagagatgtcttacgataaaagaggccaatgtttgcaacaagaactgaaaatctaaagctacatcaataaaacctgtttggatacaagacattgtgctgaatacgaccaaaaggtcaaggattcgggtgcctgaaatgatgtacgtctgacgcattcaatgtttgtgcataagtcatagtggcactaggccactctgtataagaaggtgccgtcatagctgggtttaaggggtgtccatagtttaggctggcttgagttcttggcatctgtgggaaaattgcgtcatggaacggaagcggaatcggtatcggattgaagttttgtaccggtggcgcaaccctcacatacctgttacggtcataatcaggatcataacgatccttctctctatctctaataatggcaacccgagaagtccgccctgagtctctgataacaccattcctctctacatca

SEQ ID NO: 835 - DNA, 484 bp, Arabidopsis thaliana
tcttttcacggctacaaggctaattgagagtgtcccttgcgttagagtttgttactagcttttttcgtctgaaacatggcgaattttgccaaaccagagaacgcgttgaagcgtgctgatgaattgatcaatgttggacagaaacaagatgctcttcaggcgcttcatgatctcattacttccaagagatacagagcttggcagaaaccgcttgagaagatcatgtttaagtatcttgatctttgtgttgacttgaagaggggtcgattcgctaaggatggattgattcagtatcgtattgtttgccagcaagtgaatgtcagttccttggaggaagttatcaagcacttcctacatcttgctactgacaaagctgagcaagctcggtctcaggcggatgcccttgaggaggctcttgatgttgatgaccttgaagctgataggaagcctgaggatttacagctaagtattgtcagtggggaga

SEQ ID NO: 836 - DNA, 484 bp, Arabidopsis thaliana
  misc_feature (1)...(484): n = A,T,C or G
ccacgcgtccgggcttatccttgtctgtcaaattcctgcaaaaaccctcgcctctctcagacagtaagaggaacatatttccttaatgtattgttccgtataatcttacaagacatcctggttggtgttgcagagaagagtgtttcaaagtttcttcctttttcgttttcctggtctgaatgagctcccaatgccttctttagatattgctactatccaaccttcatttcaagctcatcttgttccattgggggctcagagtattatccatgctaaaagtctacctaatccatggagacagtcttgtttctccaagaatttgaaattttacacgggtcatagtcannnccgaagaggaaaagttcttattactgcagtggccactcttgaaaccaagtannnggctcaaaaagaaaacgaacggagctcttctttgtcttctgcttcttcgaaatcctcaaatggaagtgctgatgatggcgaa

SEQ ID NO: 837 - DNA, 484 bp, Arabidopsis thaliana
cgaaagaccagataaaccttcagctggagctgggcaagacagtcgagatagattctcaggtgctttagaggcatatgctagaagaaatggctcaggaagcggtgtggtacaagctgatcgatctacaccaagaacctcagagaatgtattagcatcgtcaaaggatacaacaccacaaaactatgagagagtcgaaagaccaatctcttcaacaagacacgcaagttcttcaagaaaagctgttgtatcgagcgtacgagccacttcttcagctgatttcacagagaaccgctctagcagagttgtcccaagcaatggccgttcctcaaccgctcagaggactcagctcgtccctgacccaaccactagaccgtcatcttcttcttttacccgagctgcgccgtcgaggactgctcgtgacatcacgctccagagctttgagctactcaccatagggaatggaaagaggaagtgagaggcttgg

SEQ ID NO: 838 - DNA, 484 bp, Arabidopsis thaliana
gcggccgcgttacattcttcaggaaaaaggcgttacctttactctctctgcatcaacgaggaagcgtgtagagctaaaggagctgaatttgagagatttttttgttttgtttctgggtttgttcaaagatgcaaatttttagttgtttctgctgtggaaaaggatttgatcggtatgtatggagttttaatcttgattttcaacttgatttgctggtttatgggttttatctagtttctccattgttttgttcttcagaaatttgttcttgctttgatccgttttgctattcttctttattagggttttgagatttatatcatttctcgagcctattcatgttcaaaatttatttcttggtgtaaagtttggaactttcgaacaataatctactgtttgataagcttaagttgcagatttgataaacccaagaagaaagtaatgttaatttggtttgatgtgacaactttacacaggcaaaaga

SEQ ID NO: 839 - DNA, 484 bp, Arabidopsis thaliana
  misc_feature (1)...(484): n = A,T,C or G
aattacccgaaaccgaaccggagcggttacaatttcttctttgctgagaaacattgcaagctcaaatcactttatcccaacaaggagagagagtttacgaaacttatcggagaatcgtggagcaatctctctaccgaagaacgaatggtttatcaagacattggattgaaggataaggaaaggtatcagagggagttgaatgagtacagagaaacgttgagacttagggatggtgacatgacaaacggcaaggctttttaggtgatttagttaaaacggcaagtcgttttgttgtaggtcgtttctctcttttaagattggacgcctcgccgtnncttttattttctagcttattgtagttgtccatgcttgcttaactaggctcagtgagaggctagacttgccaaacttgaagagtctttatttatttaagaattttagatgttctaatgtattaatcctttttcgtaaaaaaaaaaaaaaa

SEQ ID NO: 840 - DNA, 484 bp, Arabidopsis thaliana
tctatcctctctctcgataagttgtattgggaacatgcggctcatgcggggacaaacacaccaggagggctgattttagtagcgttggctcatgcgtttgctctgtttgctgctgtttcagcagccattaatgtctccggcggacacgttaacccggcagtcacttttggtgctcttgttggaggcagagttacagcgatccgcgccatctactactggatcgctcagcttcttggagccatcctcgcttgtctcttgttaaggctcacaacaaacggcatgagaccagttggtttccgtctagcatcaggtgttggagcggttaatggacttgtattagagatcattttaacatttggcttagtctacgtagtgtattccactttgattgatccaaaacgtggaagcctcgggatcatagcaccgcttgcaatcggactcatagttggggcaaacatcttagtaggtggaccattttctggtg

SEQ ID NO: 841 - DNA, 484 bp, Arabidopsis thaliana
  misc_feature (1)...(484): n = A,T,C or G
ccacgcgtccgcagagagaggagattcgaatctttcaacaagctcaggattttccaagtcatcagtgttgcttttcttggtggccttttatggtggcatactccaaaatctcacatccaagatagaactgctttgctcttcttcttctcggtcttttggggcttctacccgctatacaacgcggttttcacatttccacaagagaaaagaatgctaatcaaggaacggtcttccggaatgtaccgtctttcctcctatttcatggctagaaacgttggggacctgcccttggaacttgcccttccaactgcttttgtgttcataatttactggatgggtggacttaaacctgacccaacaacgtttatcctctcgctactggttgttctctattctgtccttgttgctcaaggtcttggcttagncttcggtgctctgcttatgaacatcaagcaagccacaacgttagcatctgttactacac

SEQ ID NO: 842 - DNA, 484 bp, Arabidopsis thaliana
ttttttttgattaaatatttcccagtattttattgaaaattcttattacaattgtatgtcctaactgaaccccacatgttaaacgacgatctctctcttttttaattttttttcctttgaaaaaaaaaaagctatacgacgacttgctctttagggaaccattttctctttgtcaaaaaatggtccacgttaatattcattgttgcaacttgcaactttaaaacatatcttagcatatgctaacaacatgcatgcactcacacagtcacactatattaagtcaaaagagatgatcaagtatgtgactactctcgtacatgacagcgtcgtacgaagtcatctcgtacatatccattgcatcaatctccattaaacgccttacttcctcctcgccccaaatctgaatatcttctccttcactaccgtcaatcttctgacccatcattgaatctctttcttcttcttcttcttctttttcttcttc

SEQ ID NO: 843 - DNA, 484 bp, Arabidopsis thaliana
ccacgcgtccgctgtctttggaaccgactacaagacaaaggatggtacaggggttagagattacattcatgtcatggatttagcagatggacacatagctgctctgcgcaagctagatgatctcaaaatcagttgtgaggtatacaatcttggaacgggtaatggaacatcggtcctagaaatggtcgctgcctttgaaaaagcatccggaaagaaaatccctttggtgatggctggacgacgtcctggagacgctgaggttgtttacgcctcaacggaaaaagcagagcgcgaactaaattggaaggctaagaatgggatagaggagatgtgtagggatctatggaattgggcaagcaataacccctacggctacaattcctcctccaatggctcctcttcataattctccttttttaatttttattttgccttttttgcttacttatattcatataaacaaacacataaaaaaaaaaaaaaa

SEQ ID NO: 844 - DNA, 484 bp, Arabidopsis thaliana
aattatatattactaattcatatttcttgggaagctcggaaacagaggtaaagcactgtgattactgattagtcacacatacacacacacattcaccattacaagaaccattcttttattgatacagaacatgaaactagcgcgtcatggtggtaaattacgtttataatgaagttcatcaagcgaaataactgagatactcgtcaacacttgtgtacttgacatcagggtaaagctcagaggcttccacaccaaaggaaggctctatactgatattggtatctccattcacaaacaccgcgtggtttatcgacagaacaacattgatgggaatcggagactcttggatgcttttaagtagttgttcctctgggaggtgagtcttctcaagagacttgccaatctttttctcccacaaggtgactatttcgttcatcgataaagtgttgttagaaggcttaatgtataggattttgttcagagt

SEQ ID NO: 845 - DNA, 484 bp, Arabidopsis thaliana
  misc_feature (1)...(484): n = A,T,C or G
aatccgcgagagagctgcttcagcgccttctcaagatcgataatgacaattaccctgagactttgaacagaatgttcatcatcaatgctggtcctggattccggctcttgtgggctccaattaaaaagttcctcgatccaaaaacgacatcaaagattcatgttcttgggaacaaataccaacccaaattgctcgaagccatagacgctagcgagttgccatatttctttggcggcctttgtacttgtgcagacaaaggtggctgtttgcgatctgacaaaggcccatggaatgatcctgagcttcttaagatagctaggaaccctgaagccagattctcgacaatttcagaggaagactacttgcttgtagaagaaggaacatcaatgtcgatggtctttgaacctctagagagaaacnngatgaaaaccatcgaagagaatgtgagtgagaagcacattgacgcggttgacaagttcatggc

SEQ ID NO: 846 - DNA, 484 bp, Arabidopsis thaliana
  misc_feature (1)...(484): n = A,T,C or G
aatctgggaagaagctccagtggcaaagactcaacatttctagtggagaagatgagaggtgggagtctatggcagctagggcaatcaataacccgtcgtcttgctcaatctgacaagaaggttgtgtcacgtcgctactttgcctctgaagctgacttgaaaaagactgctctttacgacttccatgttgcccatggaggaaagatggttccttttgctggttggagtatgccaattcagtacaaagattcgattatggactcaacggttaactgcagggaaaatgggagtttgtttgatgttgcacatatgtgtggtttgagccttaagggtaaagattgtgttccttttcttgagacacttgtggttgctgatgtggctggtttggctcctggaactgggagcttaactgtgttcacaaacgagaannnagntgccattgatgactcggtgattaccaaagtgacagatgaacatatctatt

SEQ ID NO: 847 - DNA, 484 bp, Arabidopsis thaliana
  misc_feature (1)...(484): n = A,T,C or G
tttcaaggctttgcggagaagtttggagatattgggagctttgggtggtttcgctttgaaattggggattgaccagaagcagggcaacttagagaagaacatgaagaagagagcaatcgagctccggcggatcttcactcgtctcggacctacttttgttaaattgggtcaaggtttgtccacccgacccgacctctgtccacccgattaccttgaagaacttgcagagcttcaggatgctttgccaaccttccctgatgcagaggcatttgcttgcattgagagagagttggatttgtcgctagagaccattttctcgtctgtatctcctgagccaatcgcagcagctagtcttggccaggtttacaaagctcagctgaggtattcaggtcaggttgttgctgtcaaagttcaacgcccnnnnatcgaagaagccattggccttgatttttaccttattagaggagttgggaaactcattaac

SEQ ID NO: 848 - DNA, 484 bp, Arabidopsis thaliana
cggccgcgcaaagcctaagtttattcggttcaatgtgagtcaatccaggaactgcccccttgaacaagaaatccgaagttaatgttctaaggatatcaagaggcgtgattccaccaactgtcctcacattaggatcagcatggtggtctaacagaacagccaccatgtctggagagaccatctcagccgcgatgtgcaaaggtgttttccctgccggacccgccggataattcacatcggcagctccaagctcaagcaaagccttcacaacttctctactacagctttcaacagcgtcttgagccacgctgagatcatggtggtggttgtgaggcattagagaacggcgagctatagaagatttaagacgaagctcttctattttggtgacgacgtcaatagggagatgcttggcaagaatctctggtgggagacctgatttagcaactaagtgagagcaggtggtccataattgatgcatgtc

SEQ ID NO: 849 - DNA, 484 bp, Arabidopsis thaliana
ttcaattccgatggttggggaccaccagatgcttccgacacttcctccaccagcgtcgcggcggcgaatctcctcccaaacgtccccttcgcttccttctcacgatccgaaaaactcggacgcgttgctgattggactcgagctctctcaaatccatcagctcgtcctcacaccggatccaaatcagatccatcagcgatcttcgatttctcagcttttgcagtagatgaaggatttggtctaacaaactcaggtggaaacgccgacgaagacgccgctttccgattagtcgacggaaaaccaccgccgcgtcctaaattcggacctaaatggagattcaatcaataccataaccgaaatcagcttcctcaacgtcgtgatgaagaagttgaagctaagaaacgtgaagctgagaaagatcgagctcgtcgtgatcgtctctacaataacaatcgtaacaatattcatcagcaacgccgtgaag

SEQ ID NO: 850 - DNA, 484 bp, Arabidopsis thaliana
tagtagtggccggtcagggtcgtttcatcatttagagatcatagataaacattctgactctgctgaagaagtttctgcttcttcatcattgtataatattgcaactccatctccattgtctggtttgcctgaatctcaccttggttggggacactggtttactttgagagatcttgaaacagcaactaacagattctctaaagagaatgttataggtgaaggcggttacggtgttgtctacagaggagagttaatgaatggaactcctgttgcagttaaaaagattcttaaccagttctgagaaagagtttcgagtcgaggttgatgctatcggtcatgtgcggcacaagaacttggttcggcttcttggttactgcattgaaggcacacacaggatattggtttacgaatatgtgaataatggaaacttagaacaatggcttcatggagcaatgagacaacatggatatctaacttgggaagc

SEQ ID NO: 851 - DNA, 484 bp, Arabidopsis thaliana
  misc_feature (1)...(484): n = A,T,C or G
ccacgcgtccgcgcgacggtggagttttattgggcgccatttttggtggaatcaaattcagacgatccggaaaagcacagtataatcgaccgtataataatgccagagtccatcgagaagcatggagtcaactggataggcgttgactttcttgtcttcaatagttacatctggtggatgaatactgtctccatcaaagtcctgtaagtagtaatgttatagtatacacactcacacatacttatgtattgaatatcctannattgaagatttgtgatgatggaaacagacgtggatcgttcgatgatggggacacagagtatgatgagatcaaacggccaatagcgtacgagagggtgttgaggacattgggagattgggtggaccataacattgatcctctaagtacaactgttttcttcatgagcatgtctcctcttcacatcaagtaataaatttctcccatccataacatttttttttt

SEQ ID NO: 852 - DNA, 484 bp, Arabidopsis thaliana
tcaaaacttgctgactttcagaaaattatcgagcggacctctcaattcgaagccgctctaaaggaactgaattttgtttcatcatctgacgcagagagtaggctcagcaaatatgctgaagatgtggaggttcattttgcatctagaaagaagatagaaatcctagcaaaagcaagaaatttgctgttgcagtgtaactttacgattccccaggatattgctatgaggaatgccaagcacatcgtctgcttacttttctcctctgaaaggtgtgtggtatctgaagctgcatctcaacttatgaatttggtgcataagacgctcgaggatgtctgtgtttcttctgcaagggttgcttcagagttctacaacgctgctagagattctatccttctatatgaagctgttgttcctgtcaagctagagaaacaactcgatggcctcaatgaagctgctgttcttctgcacaacgattgtctatatt

SEQ ID NO: 853 - DNA, 483 bp, Arabidopsis thaliana
aagaactgcaaacacagcctcgagcttccttattccgtagttctcaagaaacaagaagacgaaacaatcaagagcagtaataacaacaccagcccaaagaggcaaaatcccattactcaaaatcttgatagcaatagcactaccaataacttcttgaatatcagatccaatcaaagccaattcagccataacccacaaaaccattcttgcccaagtaggatactcatcacgacaaagctcagctaagtgacgacctgtcgcaacaccaagcctagccgacaaaagctgaaccaaaagacccattgctgttgcccacatgagaagccataacaaagagtacccagcaaccgcaccggcttgaagatctccttcgagattccctggatctaaaaacgcaatgctcattaaaaacccaggtccggtgaataaccatagcttcttccatgagaacggtggtgcgccgccgcatccgacgccgtgttc

SEQ ID NO: 854 - DNA, 483 bp, Arabidopsis thaliana
gaaccttaaccaaaaagaaaacgtctacggagacatatggagaggaaacatcacttcgtgttagttcacaacgcttatcatggagcctggatctggtacaagctcaagcccctccttgaatcagccggccaccgcgttactgctgtcgaactcgccgcctccgggatcgacccacgaccaatccaggccgttgaaaccgtcgacgaatactccaaaccgttgatcgaaaccctcaaatctctttcagagaacgaagaggtaattctggttggattcagcttcggaggcatcaacatcgctctcgccgccgacatatttccggcgaagattaaggttcttgtgttcctcaacgccttcttgcccgacacaacccacgtgccttctcacgttctggacaagtatatggagatgcctggaggtttgggagattgtgagttttcatctcatgaaacaagaaatgggacgatgagtttattgaagatg

SEQ ID NO: 855 - DNA, 483 bp, Arabidopsis thaliana
cttttttttttttttttttttttttttttgcctaatattttgtctatctcgataggacatgggtaagtttcatactttataatacaaaaagacacataaatactgcaaatataagtacatacccttattatgaagactacagaacatatacaaagattctgaacatatattatacacgcatattgcatttgagtatgtgtattaaatatgcttctatatatgttatttacctaaatacgaacattcacgaaggtgttcatatgtgtcttaggatgatgcggtaatagaagtgtgttggggaaaatcacggaacatggtagttggaggcacatggccagtttcatcactcaagttctcttcttcttctcctaatgcttcatcttcttcgtcctcatccacatcccacagaaaccttgcgtatgaagcttgcacataacaatcttccggggacatcttgacggcttgcttatagtaagagtgggc

SEQ ID NO: 856 - DNA, 483 bp, Arabidopsis thaliana
ccacgcgtccggtacacctgcgttcactgtgatttctaaggttccaaccgttatccttgggatggatgtttcacatggatctcctggacagtctgatgtcccgtccatcgctgctgtggtgagttctagggagtggccactgatatccaaatatagagcatctgttcggacacagccttctaaggctgagatgattgagtcccttgtcaagaaaaatggaactgaagacgatggcattatcaaggagttgctggtagatttctacaccagctcgaataagagaaaaccagagcatatcataattttcagggatggtgtgagtgaatctcaattcaatcaggttctgaatattgaacttgatcagatcatcgaggcttgcaagctcttagacgcaaattggaacccaaagttccttttgttggtggctcaaaagaatcatcataccaagttcttccagccaacgtctcctgaaaatgttcctcc

SEQ ID NO: 857 - DNA, 483 bp, Arabidopsis thaliana
cttttttttttttttttagttacactttaaagctttattaacagattcttttaaaaacagagactgagagattgggagaggcagattacattaactctctttctctctctcactttctcatcttgttcccaaggttaaaaaacaattcgaggacatgtctttcctattttcagaggagagagccatcagcaccgaatgttgtcttttcactctcatcaaacttctccttccctatcttcatttcctcttctttccagagccgatggtaaggagctcgaagtttctaatggcatcctcatgcccaggccttgctgcagctgcagattcatagctctgtggaacccgttgggttgtggcatgacgtgaaccacttgaaaatagtcggcttgagtggttctcgcttggttcagctgatgagccaggtctggtgcttgatatcacacctctctttgaggtacttccatttcgagactcgtgcacttc

SEQ ID NO: 858 - DNA, 483 bp, Arabidopsis thaliana
ccacgcgtccgtgatgctgatcaggtcacaagcaatcctgaatcgatccaggttctcaagagagttgcgaaaacagtctcgagctatctaaacgaagaaaacgctctagtgaaagcagagcaagcttgtttcttgcccagcacagaagatggagttcctgtgatcggagagattccaggaatcaagggatgttatgtaggcacagggcatagttgttgggggattcttaatggtccagccactggtgctgctttggctgagcttattgtagacggtgtagccacaagtgttgatcttagccggtttagtccttcccggtttagcaaacgaagatgaagagtatagtaatatagagtgttcgttgagatatcacataaaagctactctgttctttgaagtctaagcaaacagaattgtgaacgaggaatcttaaaatgtgataatgtgatacgtgattgtattttgtaaaaaaaaaaaaaaaag

SEQ ID NO: 859 - DNA, 483 bp, Arabidopsis thaliana
aagagagatgaagatgattctgatgagtctgaggatgaagatgacagacgtgtgaagagaaagagtagaaaggagaagaggagaaggagaagccgtcgtaatcattctgatgattctgattcagagtcttctgaagatgatagaagacagaagcggaggaacaaagtcgcagcttcttctgactcagaagcaaatgtttcaggcgatgatgtttcacgcgttggacgtggttcttctaagcggtctgagaagaagagcaggaaacgtcatcacaggaaagagcgagagtaggaaatcgatctatatgagccattttcactctccatttctctcttatcaatgttatgtacaataatgaaacatgtctttgtatgttggatttgatttgtgttgaaacatgtctttgtattttcactctccatactctggtttggtctgtttgtttcaagcttgtgttataacactattgagatacttggtgtt

SEQ ID NO: 860 - DNA, 483 bp, Arabidopsis thaliana
ggagttgatgtattgagagaagccattgagataagagatgagctctacgcaggctaatctatgcagaccatccttgttctgtgcaaggacaactcaaacaagacatgtctctagtgcaccttttatgtcgtcattacgctttgattatcgaccactccccaaattagctattcgggcatctgcatcatcatcgatgtcttctcagttttcgcctctacagaatcatcgctgccggaatcagaggcaaggtcctgttgtgtgtttacttggtgggaaggataagtctaacggtagtaatgagctatcatcaacatgggaagctattgagaaagcaatggggaagaaatcagttgaagatatgttgcgtgagcagatacaaaagaaagacactggcggcattcctccacgaggacgaggaggagggggtggcggtagaaatggtgggaataatgggtctggaggctcatcaggggaagatggtgg

SEQ ID NO: 861 - DNA, 483 bp, Arabidopsis thaliana
caaccaggcaacgaccaatggaccctcctagtcctcctcctcctcccattcctgaatcccgaccacgacctcttactcctcccgtgctcctaacccgaccacgacctcctcttccttatgctcgccctcttcagccaccgcaaagtcttccaccccgaccacgaccccaggtgtttgttagtttccgaggaaaggagctgcgccacggcttcgtgagtcatgtagtgaaagccttgagaattgcaggggtcaactttttcattgatagcaacgagatgaaagggagagaccttcaaaacctcttcaagagaatcgaaaactcaaagatggcactcgtgatcttctctgaccggttctcggagtcagactggtgcttaaacgagctcgtgaagattgatgattgcgtcaaggaagggaaacttacagtgatccctgtcttctacagggtcaatacagacgacgtgaaaaatttcaaaggtaaat

SEQ ID NO: 862 - DNA, 483 bp, Arabidopsis thaliana
ttcttattcgtaacaaagttattgtaaacttatagaatggttgtgaaactatatggacaggtaacagcagcttgtccacaaagagtcttgctttgttttctcgagaaaggaattgaatttgagattattcatatcgatcttgatacatttgagcaaaaaaaaccagaacatcttcttcgtcagccatttggtcaagttccagccatagaagatggagatttcaagctttttgaatcacgagccatcgcgagatactacgctaccaagttcgcggaccaaggcacgaaccttttgggcaagtctctagagcaccgagccatcgtggaccagtgggctgacgtggagacctattacttcaacgttctggcccaacccctcgtgattaacctaatcatcaagcctaggttaggcgagaaatgtgacgtcgttttggtcgaggatctcaaagtgaagctaggagtggtcttggacatatacaataac

SEQ ID NO: 863 - DNA, 483 bp, Arabidopsis thaliana
gagaacgttgaggtaccaacaaagacagtggaggagacagtggtggagacagaggtgacccaacagccggaagaatccgtccccgccgtgacagaacaaaaatccgaagcaccaattgtagaaacaaacgaagaagtggttgtggaagaggcagagaagaaagatgaagaaaccgagaagaaaacagaggagaaagacgagaagacagaagtgatcacggaaactccggtagttgaggaggaggagaagaaagctgaggaagtgaccgaaactccggcggttgtggaggaggagaagaagacagaggtggttgaggagaaacagactgaggttgcggctgctgaggaagtcgccgttgagaaggccgaggagtaaagaggaaggaagaagctatatatgaccttttttggtctcatatcgttttctgtttattttattttatcaacatttcataagtattttctatgaaaaaaaaaaaaaaaa

SEQ ID NO: 864 - DNA, 483 bp, Arabidopsis thaliana
ctttttttttttttttttaatatcaaattagaacaatatatagttcatgaaaatgaaacacgcgaatcaatttttagggaaaaataaaacatgataccggaacaaacacactttccgatttgatttgtaagaaaaaaagcaaagaaaagaaaaaacgtaggattccgctcagtctttggatctctccgtgaataattgtaaagaatgtgtgcaagaatcaacgtcctcagttgttgaagactctgcagtttctcctgatctctccagaacgtccggtaagaaccttaatggtacccattttcaccaatgcttcggcaaatctctttctgaagagtgtattgcttgatgcataaccagacacaatcccactggttgatctatcaagacccaagttttgatcaattcttagaattcctctttgtcttcggatctctccatagattgcgttatccacagtaaatgaagtcttttggtccaaaaacg

SEQ ID NO: 865 - DNA, 483 bp, Arabidopsis thaliana
ccacgcgtccgcggacaatcaaaatgcaagtgaagagcctaagaaagatctgagaagtcgaggtttatgtcttgtcccaatctcatgcacactccaagtaggcagcgacaacggcgcggactattgggctccagcacttggctccgccggtttccattgagccaatgaaattacgccacgtggaattccagcgttagagaaaaatgatataacatcacgagcagtcagtctactgagaaaacaacaaattgagtttccaaggctgattgctcatgatgctatacaaagttcttcgtttaaaactttgctagagaatttgcgtctggcgtctgatgaatatgcgtttggcgtttcatcatttgatgcgttatcagatgatatgaccaagtgatcaatttatgttcttgctttaggaaactgtttgttttcttttaccggttaattgtaatttgtggttaagtacttattttaaaaaaaaaaaag

SEQ ID NO: 866 - DNA, 483 bp, Arabidopsis thaliana
cacaaccaccgttctccgtcacggtggcgctttattctctcatcggagcgcctcaccggtggcagacggtgtcgttgttcctctcctaaaacctccatcaatcaccatctctttacacagagctctaaccaaaatcttcgagagatggggcagagtatgagctgtggaagtcgaccggagcacggaatattcgcctctgtacagtgcggcgatatcatcactatccgtcgtgtgatggcgacggagcctagtctgttgaatcaaactactccttatgatcgtcactctgttcttcatgtcgctgctgctaatggtcagatcgagattttgtcattgcttttggaacgatttacgaatccagatttgttgaatcgtcacaagcagactccgttaatgttggctgcgatgtatggaagaatctcttgtgtgaagaagctagctgaagttggagctaatattttgatgtttgattctgtgaatcga

SEQ ID NO: 867 - DNA, 483 bp, Arabidopsis thaliana
acattacaataattctctttaattacaagaagaagcacaataaccattgaagaacagagcaacaacgaatctcacagtatggttgcaaatgcagtttataaatagtgttgaatcttatgaagacactacaaggtcagaaactcagaagtagatgtctgattgcttggattgtgcctttagatcctttagtttcttcaatatgttgctgaagtaatcctgcaagtacttctctagagtcaccatatccttctgatccacacctagtagactattagtctcagtcatcggagcagagaagaccgtgtcactcgagagaacctctgagaaggccagtctatccgcgacatcatttgtccattgaaagaaccgagttaactgacgcgtgactctcaatacagaaactggaacggttgtgacatttgcatcttgcccagcaagtctctcacatagtgttatcacttcttgtgttgtccatgcacgagg

SEQ ID NO: 868 - DNA, 483 bp, Arabidopsis thaliana
gtatcttcttcaggagctggaccaagtgtggggaaaccacctggccgtcttgtcacagcttctttaaatcctaaaagagctgtgaaaggagcggcttcatctgttgatcttggcaacaacaagagaaagaggcaagatgagaaaccgaagaaagtatctgcagaagagaaagctgcattgaaggcaagagaagctgctaggaaacgagttgaagatagagaaaaaccattgcttggtctttacaatagacccttttgatgcatcattggcttgatcctatatgcaaaagggagaggctaagcagagaagagtgatgattgatctcattgtggcggttatttcagttattcctacatgacagtttattccaaaactctctggtatttctgggagcattggtcttgtgttcttctaactgttgttccagtcatatcagtttcctctttgttgtacacacctattcaattttatagtcagaatgat

SEQ ID NO: 869 - DNA, 483 bp, Arabidopsis thaliana
gcggccgcgaaaaacttcgcctcttccagaatccaacggtgttcctgaaggcaacatagagtctaatgttgtcatttctcatgaggaagaggctcccatcttgataccaacacatggaattgcgaaaagaacctcatggtttagttgctgcggcttgtttgatgtggtcacaggatccagtagataaactcagaaacagtgtgttgcctacaaattggaagctgcagaagtgttatagcggcgaagaattatcggtttcctctctcgatcacctgtgaaaattcagtaacttgatgaatgaatgtctctcaaatcacaaattttctcaaatgatagagtactcatcttctagtaatattcagaacagatatgcttacaatttctgctctttatatatgtccttaccaagttctttttagtttttcattctgtcattcgttttgatatgtaccattttcttgtctgttattgtttcggcggccg

SEQ ID NO: 870 - DNA, 483 bp, Arabidopsis thaliana
gcggccgcgctttgctttggttgcgtgatctcctctctcatcaatcttcttcatcatcattctcatcatcattagcttcttgatttttttttccttctttttttcgtttcaagaaactaaacaaagtttctatttatggttttctgattcttcttctacagatctattatttgattctccttcgatcattgtcaacgttttcttcttttgtaatcatcacagttttttttgagaatttgttcatttttttttctcatatattgattcgagttctttcttcttgaatcttgttcttcatagatctagtttttgttttttactctctagatctatagatctgttgaattcacttctttaatccatctctgtgttcttgagttcctatggtctaagtcaaactcaagttcaagatctgttgaatttggaatcttgctggtgaagttagagatgaattatttcccagatgaagtaatagagcatgta

SEQ ID NO: 871 - DNA, 483 bp, Arabidopsis thaliana
tttttttttaataagaaaatctgagtatttttttgttttttgttttgagtagggttgatccttaaaaatactaaaaccatccgtacacaacaacaacatcaaagggaaagagaactaaggagaggagttaaaaaagagctgccacaagttaacaccaaaggggagtcacagtcacagtcacattttaccattcacctttttttatcactagtgaaagtaaggaggaggaggaggagcctggtactgatagcagttcgcgtagaagttcccatgtgcaggagcaggattgaacgtgtaagtctgaggaggaggaggtggtggaggttgtgctgccatgattggaccgctaaggaacggtctgttgtcatagacatactgcggatacctttcagggatgactctaccgtatcctgtcttgttgttgttgatgttgttgttgttgtcagtgactcggggttgagcaccacgtggtcgttttggctg

SEQ ID NO: 872 - DNA, 483 bp, Arabidopsis thaliana
gcggccgcctctcctcgttttcgcttcgtgcttatttgtcaaacgcgaacatttcaccgaaacttagcgacttttctcgctttactctttctgggagcaatttctcagagcataggcgagcttaaaggtgacagttcttagctatggctacgattacaccttcttctattagcaatgcctggctcattcctggagcttcttttactgtaaagaagagtgattgttccatcaaatgtagcttttcgcgtaaagctgggaaacagattctatcatcaacgcagagacttgtgttacctttgtcgacttcacttagattgtttcctacacatggaaggcagtttgtgttgcatcctcatcgtagagctactgggactgatgttgtggcggctgtagaggaacaagattctactcctgttgttgcggaggataaagaaaccgtggctagtgagaagtcagatgctcctgctccaacatctcagtcaa

SEQ ID NO: 873 - DNA, 483 bp, Arabidopsis thaliana
cctctagagcggccgccctttttttttttttttttttttttgcataaagattgcgttgtccattgacaacacaagactcaattcaccaatgacacactaattgttacaacaaggacagtaagtaaaacagaccaaagactcgaactcaatgcttcatttttgatccttcagatatgaatcatccatcttcagcaatcaaacatatcagcagaagctctgattggttgcattggacaaggcatctgccaagggttctgcatagattcaggaatctcaggaatatccaaagcctgaccactaatttcttcaaccatctcaagcacagagttcaatgatctcaacctatccgtcaactccgaagcctgtgccctcaagacattgttcttagactccatttcaatgtatttctttgaagcttcatcaacctgctcagtgattttagcgttatcattcttgagaagagtgacttcgttgatcaaatca

SEQ ID NO: 874 - DNA, 483 bp, Arabidopsis thaliana
  misc_feature (1)...(483): n = A,T,C or G
ccacgcgtccgggcagtttatgatcagagtggagatagaaacagaacacaaattgatacatcgaggaaaaggaaatctagaagtagaggtgacggtactactgtggctgagagattaaagagatggaaagagtataacgagaccgnnnnagaagtttctaccaagaagaggaaagtacctgcgaaagggtcgaagaagggttgtatgaaaggtaaaggaggaccagagaatagccgatgtagtttcagaggagttaggcaaaggatttggggtaaatgggttgctgagatcagagagcctaatcgaggtagcaggctttggcttggtactttccctactgctcaagaagctgcttctgcttatgatgaggctgctaaagctatgtatggtcctttggctcgtcttaatttccctcggtctgatgcgtctgaggttacgagtacctcaagtcagtctgaggtgtgtactgttgagactcctggt

SEQ ID NO: 875 - DNA, 483 bp, Arabidopsis thaliana
cggccgccaaaagtgtgatgacgtagtagttaacaaaagagtaacagtggtttgtttatacatctcttaatcaaagagtcaggaccataacaagaaaacattacaatcttcagcaatcaataggctccacgtccaaacatttcccaggttttcatctttctgcacaattagtcatgtgtcagccacttcttaggaaaatgatttgtatgccttatctagtctccatccagaaattggagatcttgaggctgttctttgatattttacatgccaacctttctaatatcttcaaggatatgggttcgaaagagaagtctcgtagaccatcaaacacctgtctgcttcagccttcagccataagcttttatagaacagtgcattttggttaatctgctccacaccttgatgctgttggtaaccatttgtaggcacaacctgaccaaagccgttatcttcggttgcaccatattgatacgaacgaga

SEQ ID NO: 876 - DNA, 483 bp, Arabidopsis thaliana
agcaatcaaaactcgtttgaccaggttccaagtaatattattgggattgttcctccagctcctgggaaccagcatccacaatttgagacttctgaccctcaagcacgtgatgcccttcgtcttcccagttttatgggccaacaaccttttgatacggcgagctactatgctcagttctaccgctcaggtcctgacagtgatggccgtgtttctcccttcgtttccccaggggttgcctccaaatttaatgggattacagtattgcctccgcattcatctcaaaccatgcaagagggtggaaataacttggtcctgtctactgctagtccaccaccactggtaactcaagctgctggactaatgcagagctctatacctgtcacgcagcagcctgttcctgttttccgccctccgggcttacatatgtcgcattatccaccaaactacgtgccatatggatacttctccccattctatttacct

SEQ ID NO: 877 - DNA, 483 bp, Arabidopsis thaliana
  misc_feature (1)...(483): n = A,T,C or G
tcgcggccgcgcctttttgagcccacagtaaaaccatttgtcccgtctttttcagatcagctcaaactcctccgggttcttataatcagggactgtgatctcctgaaaagcattgaagagcttaaggctcttacaaagctaaatactcttgaagtttctggtgctagctccctgagcaaaatatctgaaaaattctttgagtcatttcctgaactccgaagtcttcacctctctgggcttaagatcgagtcttcccctcccagtatttctggcctgaaggaacttcactgtctcatcatcaaagactgccctttattgcaagatctgccaaacatacaagaactagtaaatcttgaggttnnngatgtttctggtgctagtgggcttcgaacttgtttcgacaacgcagatggtgccaagaaaaacaagagcaaaaacaaaaacttttatcttcttacaaaacttcagcatcttgacttctcg

SEQ ID NO: 878 - DNA, 483 bp, Arabidopsis thaliana
acagaataatgaacacatattctgttgtaccctctccaaaagtgtcagatactgttgtagaaccctacaatgctaccctttcagttcaccaattggtagaaaatactgatgaaacctactgtattgacaacgaagccttgtatgacatttgcttccgtacattaaaacttacaacaccaacatacggtgacttaaaccacttagtctctttgactatgtctggagtgaccacttgtctcaggttccctggtcaattgaatgctgatctccgtaaactcgccgtcaacatggttcctttccccaggttacatttcttcatgcctggtttcgctcctcttacttctcgtggaagccaacaatacagggcactaaccgttcccgaacttacccaacaaatgtttgatgccaaaaacatgatggcagcatgtgacccaagacatggacgttatctaacagtagcagctgtattccgtggccgtatgt

SEQ ID NO: 879 - DNA, 483 bp, Arabidopsis thaliana
  misc_feature (1)...(483): n = A,T,C or G
tggagcttcggtggtctgatgaaaactctagccaccagatccgaatccgtgattgaaacctaccgacgagatctcgaagaatttggcacaggtttgaagaaagagatcgaggtggctcanngatcgcttggtacggtgggacatgcgattgatgagcttgggaacacggtgctaaaaggtacgnnngagattattgctcaaggtaaggaagcgattttagccgctggtaatgaatctgattcttctgataacaatagtagtcagagttttggtcgtcgtgatagcttcagttcgaaaccatatagtcgtttcgatgctcagattcgtgctgttcaaggagatctcaacacttactgtgaagagcctgaggattcagatgattacaaaaagtgggaatctgcgttttctctggatggaaaagctgaggagatggagaaattgttggaggaaaatggtgatatgaaaggagtgtataaaagggtc

SEQ ID NO: 880 - DNA, 482 bp, Arabidopsis thaliana
ttttttttttttttttaggaaacaaaaggaatgacatttgctattaatattaatgttaaggattcgatagttttacagtttacacactcttctgtctctctactcttcacatgagctcagcttcttcggtgtctccatcaacatcttcaacatcgttctcgtcattctcatctgttgcatctgggtctattcccttcatttgtttctccaagcgatctagtccctttttggctgcctcattctgtggatttattcttaatgcagcttgaaagtgtgataaagaatcttgtagcatattcgttgcagcaaacacttgagctagcttgacgtggagagaatcatctgcataatctttgagatatcgttcaagtagtgatacagcatctccattcctcccttccattagatgaagctcagctagggctaacacagctccaaggtacccaggttccagcctcagacctgactcgtaaaactttttt

SEQ ID NO: 881 - DNA, 482 bp, Arabidopsis thaliana
tttttttttttttttttttccgtcgaacttcaatttaattccattaaatatatcatgaaacctcttgattaattacaaaatccattaacaaaaaaataattaatataaatttgattgagattaatgaaaattgtttcagattctttgagagacagtaagtagaaaaatacttcattgacatgttgtggtttaatctcaatcctcgtcctcgtcatggttaactttcgccgaacttaatgttctacacggttgtgacggcagttgctgcggtggtggcgcgtcgacaacaaacgctgacgacatctccatttggcaaactctaacagctccgattaatctctccggcagctcctcttccgtttgtgcctctgctaagaaccccatatcgattgtcacgctcgtcacgtaccctaaagccagccgtagaatcgccgttgcgatcgctgagctgctaatgtcgacgtcaatttcaaagtagttag

SEQ ID NO: 882 - DNA, 482 bp, Arabidopsis thaliana
cttcctaatacaatgagactttgagtccaattcaaaaactgtacactaaaacacacaaaagagagttcctttcttcaccaggagtaatgccggaaccttctccgactcgttctcctaaaaggtttacaagcaagaatgctaagatcaacagctgcagcaagtgccatgaaaatggctgcatcttccacacaagttacatgtctcatagctaattgtacaacgggcttgctgcttttcccttccccttgcactctcgagctcattacaaacccacctccagagacacactgtcccaaccctgagaagtctccactactctgcgggcttggaattggtgtagctgcaactgttagcatctgtttatccgtgtcgattaaaaattccccacctttctcagcgctgatgaggatttcagacattaaaacatctccaacttctagaccgtttgatagaagatggaatctgcaacacacggagtctct

SEQ ID NO: 883 - DNA, 482 bp, Arabidopsis thaliana
tttatcaaaatcctcgaacacaattaaaatgtgaacacaaaagctgagtgttttagtctgaaaacagaaaatttgaggcattaagctcaaaagataaaaaactacaagaggcatgagataaagaaggcttgactgatttactcttcatcgtcctcatcatcatcatcaccacctgctccattcaatgccttgactctctcgatcaacttgttcttcctctcctcgtaagtaagtttcttcaagttgtacctcttgtgttgcttgggagcaggtttcacggttttctttgggttggggtcagcacgaatagctgcgtgaaccttcttgtacaactcctcaatgctctcagcttcaactcctttcttgatgtaagcactgaagtgagtttgtaacttctctggctcatcttctcccaacagcttcatgtagtttgagacatggccaccatagatgtagttcctgtggatttcagcatcaagttg

SEQ ID NO: 884 - DNA, 482 bp, Arabidopsis thaliana
  misc_feature (1)...(482): n = A,T,C or G
cccgggcaggtactgaaagatgaagaagcgtaaagccaaaacaatctcgaggatgataccccgttttcccgagtgnngaagatgtcctatttccttctcccaccaagactcccaactcttttctggaggaacaccaattccccctcggttatatatccatttattccaatctgtccaatcatctacgatcttttgccactcgaaaccagagggattgaacaggaaaggagcaaagagccaagtcaccaccatgaaccatatcgaaacagtgatcagaatatatgtaacaactcctctataggcatggccaaatatctgatacactagcaggagtatcatcagctcaatacccttcacaaaatgactgcgcgagtagaatctgtagttttcagcaaatttggcatggaacaccacaaaaccacgcccagtgcctctgtattctgcgccgccatgaaacaatgttcgaccatagtaatgagttt

SEQ ID NO: 885 - DNA, 482 bp, Arabidopsis thaliana
cacttctccagatatggttacatctccgacgaactcaacaatcaaatttctctgtagctatggcggcaaaatcctacctcgttatcccgacggtaaactccgttacaacggtggtcacactcgcgtcctcgccgttcctcgctccgtctcattttccggttagtttcacgctctcgatctcattgtcaattttgaatttcacaaaaaaaaaaacgaaatcggttttgtggaaagagaaattaaggccacacgtgtggtgcgttttaacagagttagcgtcgaagatggcggagatgtgcggcggcgtcggcggatctataaccgtaacgatccgatgtcagcttccgacggaagatctcgacgcgctcgtttcaattacttccgatgaagatctagtgaatctaatcgaagagtacgatctcgtttcctcttcatctccgatgaaaatcagagtcttcttaaatccaccaaaatccgccgcc

SEQ ID NO: 886 - DNA, 482 bp, Arabidopsis thaliana
aaatatcatcggagaaaagaaacagagacacgaaacagagaaaaccatgcagagattcgcggcgaaaagatcggtgcaaaacatttccgtctctctatggcgtcgatgtatctcatcgacgtctcaggcagcgacagcttccgttaaggattccgacgagtttcaggcgaggcttcctccttttgcttacactcctccgccgtatactggtccttccgccgatgttatccttagcaaaaggaaggagtttctcagtccttccatgttctgtctctatcggaaaccgttaaacattgtggatgggaaaatgcagtatctatttgatgagagtggtcggagatatttagatgcatttgctgggattgctgttgtgaattgtggacattgtcatccagatgtggttgagccagtgattaatcaaatcaagaggcttcagcatcctactgttctttaccttaaccatgccattgctgatttctctg

SEQ ID NO: 887 - DNA, 482 bp, Arabidopsis thaliana
ctgtaacttctctttctttccctctctctctttcgctgcttctcttctgtatctgattcccttttttacgggagctgtagatttgagtagtgtaagcgtcgatgaagaaggttacatcgtctaagattccggccaaggatgattgggtggctgtagcgataactgacgacgatttggtcgttgagcttcttttacggctgaagcatgccggaacggtagtgtcggataatccggcggtgattctccctccgttgcggtggggaatccgtcaacgacggtctcgttcctcaagatttggtggcggcggcggcgttctcgtttccttgaagaaagatgtcgattccgttagagccagtccgaagactcctctctcgtggagcggcggatctggaagtggtggcggctctgcttctccttccgccgatggattcgaggataacagtcgccaagctagctgctctacatctacaggatctggatct

SEQ ID NO: 888 - DNA, 482 bp, Arabidopsis thaliana
cggccgcagtgagagaacctatcctgaagagatgattcagacgggtatatccaccattgatgtcatgaactctatcgccagaggacagaagattcccctcttttctgccgcaggtcttccccacaatgaaattgctgctcagatttgccgtcaggctggtttggttaagcgtttagagaagtcagataatcttctcgagcatcaggaggatgataacttcgccattgtgttcgcagcaatgggtgtgaacatggagactgcacaattttttaaacgtgatttcgaggagaatggatcgatggagagagtgactcttttccttaacttggcaaacgaccccactattgagcgtatcatcactcctcgtatcgcacttacaactgctgagtacttggcatatgaatgtggcaagcatgtccttgtcattctcacagacatgagttcctacgccgatgctcttcgtgaggtctctgctgcccgtg

SEQ ID NO: 889 - DNA, 482 bp, Arabidopsis thaliana
ctttaattgtgaagtgatttggtgggttaatggcgcttgcaaacatatctctgcgtttcaagtttccacctttacaatcttcttcttcttcttcttcctcgttcaatgctactttaatcaataccagaaaactctcttcaatcgtttgctcgaaaccctcctctaatgacggcggcaaagtggctaatgacgatggtggcgcaaagccgcggaagaagttgtcggagcaatcgtcatgggaagttaaagattcagaagggaaggattatctctataggcttggcgcggaatcggataatgttaacatagccgttggggcacgaagcggcatgatcgatgatgtattcattggagacttccttggaaaagattctgatattgtgtttgattaccgtcagaaggcgacgaggtcctttgaacatcttcaaggagattattacattgctccatcgtttctggataaagttgcggtccacattgtg

SEQ ID NO: 890 - DNA, 482 bp, Arabidopsis thaliana
gaagatgaaagattcagtcttgttcctcgtcgtaggcctcttctctttatctgttttggtctctcagtcgatcgcagggagagtcaaagctccattgttgcagagcaatactggtggattagttttcagcaaatccttcaattcgatctatgatacttctatgtacggacgcttgcagctcaacaatggccttgctcgaactccacaaatgggatggaatagctggaatttctttgcttgcaatatcaatgaaactgtcataaaggaaactgctgatgctttggtttcatctggcctggctgatttaggatacatacatgtcaatattgatgattgctggtccaatttgttacgcgattcaaagggtcaattggttcctcatcctgaaaccttcccatcaggaattaagcttcttgctgattatgttcattcaaagggtctcaaactcggtatatattctgatgctggcgttttcacttgtg

SEQ ID NO: 891 - DNA, 482 bp, Arabidopsis thaliana
ggtcgcggccgaggtaccttatatgcagattagagaaaacaattctgaggcgtaaatcctgatctttctgaaacttccatatgttccaatcaaattcagcagctccttttgcgttcctctgaactaagtcctggtcaaaatcacatcttcctttgatattaaaggttacaacctcatcagttatcacaggaaacttctttttcccacgtacaagacaccgaagcttttcgcgtttatcataatgcaaaccaactccaaggtttgttgaagcctcatgaaaaaagtatcttatcattgcacagaagtaacttggcactccagctcctgtatctagctctccatgaagctgcaggcgagttttggagttcaccggaaacttctccttggcatgaattttcagagacctggaattagtagcatatctcagagaagtctccatttttctcactagattttctcacctgccccgggcggccgctcga

SEQ ID NO: 892 - DNA, 482 bp, Arabidopsis thaliana
tttttttttttttttcccaatagtagaaacttttttcaatctccaaagaaattttacataatagggtttcataagtggggttattactacaaggtttcccccattttatcataaactccaaagaccaaatttccaaactgcagagcatcacggttcttcttcttcatcatcatcatcaatgacagttcttcttctagaacgacgtctccgagttccagacacttgttcatcagaagattgattattctcctcatctctaggtgatgttcctgtattaccttcatagctctctccccaaagacttgcaggtcttgaagatcttcttctcccacttgtatgtgtcctagctctagatgtaccagaccagctactactccttgagccactcgattctggtctaaacacgcggatgagaaagtacactgtaagcaagcgagtatcagcaaatagaaacccatcatcgttacttatttcatctcctc

SEQ ID NO: 893 - DNA, 482 bp, Arabidopsis thaliana
  misc_feature (1)...(482): n = A,T,C or G
tttaaataaataaaaaaaactcaacaatagagggaaataaataatcctcatttactctcccccaaaaaccataaataaaagattcacaaaaaaaaaaaaacatggaagaatcgaagaaacaagaagtgaaactatagaagccaagaagaagcaaacaagcagagcaagctcaccaccaaaccagccttagctcctccgatgatcctaaccgcaccagcatcatctgccgtcgcatcatcggcctctccgtcaggcccttcggcaggcgaatccgagtcaccaaaaggatcattatctggcgacggtgcagccttcttcttctttcctttcgctttccctttagccgcttttggagaatccgcaacatcaccatcctctggtgccggagcaggagccggagcttcaacagccgnngccttaaacaactctttnggcaacaaaaccttatcagtcgcatatatagctaaaggctgctcatcaat

SEQ ID NO: 894 - DNA, 482 bp, Arabidopsis thaliana
ttcatagaagcagagaattaatacaaactttctggtacttttagtatatacataactttgtccatatctagtctcttggcttattatctgccgtacaaattttatagattcagtaaccttgaaagagcctagcatagaagcctaagcaaatttgatggtttaaacagttttgtagagctgtgatcgtgtgggtgcatgaacttgcagttgggacaaacaggagttgatgtacacaacataaccagcatgtggcatttcatgcaaactgttgttaccatctcttgccccttgtgatcaacatcgttatcatcaccaccttcaaacgctagccaggatggtgatcgacttagtcctgtcccaattatgctcttcttacttgtgttcgtcaaaactttaatctttgatgatgatactgtttcattgtgaattgaggaggattcatatttcttcgttgtggttcgtgaaggtgaacctgaaggtga

SEQ ID NO: 895 - DNA, 482 bp, Arabidopsis thaliana
cctctagagcggccgcccttttttttttttttttataatcctaatgtataacacgataaagttgatattaaagacaattgtcaaagctctctaacccatgaaaatatttggacaaagaaataagagaggatttggtgtcttgcaagtttcacagctcctatcttaacttatcactagcttgcttgatcctaaataggatttaaaggcatacagctttcagttataaaactggttcaagctgaagtagttttcattaaactggcctgccccatttctatgcagagcggtcgggccttcaactgcgggtgggtccggctgccaatagccggacactgaactgagttgagccgcagaccggttagctacgggttggaggttgcttgagggatggtgatcaagggtaaaacgtcttggttggtcagaggaagaaacccatgttgttgaatttgacagaagagagagagcaccatcaagatcttgag

SEQ ID NO: 896 - DNA, 482 bp, Arabidopsis thaliana
  misc_feature (1)...(482): n = A,T,C or G
atagagaatcaaacaaatatctaaaatatttctatatgacaagatttctaaaatattttacacccaaattgcaaaatacactatatgacaagatttctaatgtctcctacgaggaaagatcctagctagccagctcattttattttcagcttctttatcctaacaaaggagttctactttgaacatttccaaggacttatgcgaccatgtcggcttcctgtgaatcaggaacaatgatgtcaagcctcatcatggccttatagcgttgaggaacccgagctccactgtgcatacaaatctcaaccaaagcaggggctttaccataaaaccttctgaggtttccggtaagcggatttcccttaaggtctctcacatgccatacatagtttggaggaaagacttcnnnnncaagagcatcttgccatccgtgcttcccatctctccattggtgcttgaactctccgcacagctttacactatgt

SEQ ID NO: 897 - DNA, 482 bp, Arabidopsis thaliana
  misc_feature (1)...(482): n = A,T,C or G
ttttttttttttttctttttttttttttttttcgaaccacgtaagccattggatattgtcctgcttctttgtccggannactttgcagtacgtacacaaaagcatacatacatgaacatgttgtgttttacgtttataaggcaaaaatcatggcgtttaaattggaggaaaaaaaaagttatgaaatattttacggaataacggcggcatcgagaatgtccggatgagtaatcagaagagcttctagttcagctggaggcacctttagaaatagaagggcccttgagccagagctctcccgtttggttaattcccatgaaccgacccgtattcggatccacgatcctcgcctccacatcagacgtcaacgtccccgccgtgccatatctccggctctcctccgctgaattcgtgaaagcccctccgccgttggattccgtcaaagcatacccctgcagtatatcaaccgtcggatatttctc

SEQ ID NO: 898 - DNA, 482 bp, Arabidopsis thaliana
gccacaacacaacgcttcaaatatatattactctgccactttcttcaatcttccttcaaagattcttattacagcgacacacaactcttttccatttagatttttgattttttttggttctctaaaggaggagagaaatgttggctatcttccacgaggcgtttgctcatccgccggaggaactcaacagtccggcatctgagaaatgctctaaacaaccaaaacttccagaagaaaccctaaatgatttcttattacgttaccctctcaacactttctccatgtctttcggacaagctgctgttcttgcttacgttcgtccctctgcttccttctccatccaccagaggttgttttgtggatttgatgacatctactgtctcttctttgggagcttgaacaatctgtgtcagctaaacaaacagtatggtctcaccaagacaacaaacgaggccatgtttgtgatcgaagcttataggact

SEQ ID NO: 899 - DNA, 482 bp, Arabidopsis thaliana
atgttagagcttggcgatgttcaacttgtgacctaccttgctgagaaaaaaccaacaggacaagtatttttcagaaaaggccttccttcaatcttctctttccccccaaattgtaaaaccgcagactgcctcatcaggtagctcactgactgaacccttcagtttaacggaaaaggtttgaaggagagctgtcagcagatgcaattaccgattggttcgcgaccactgtactgggtttacctagagtattctatcacacaaaagaaacactggtatctaagttcctctccaaagttccacctaataaggtgaaagtcattttattctcacaaacaggagagcgagctactcctattgttcgccaggctgccaaagattattggaattttgcctctctatctcacgtgctttggagagaagaggatgcatctttctggtggaatgcgttggaggtagaatctgcacctgccattgtgattatg

SEQ ID NO: 900 - DNA, 482 bp, Arabidopsis thaliana
cggccgctagataaaataacaaaaataatctcaagtacagtttcatctttcgaatttagtgttataacttatagatatgtgcaacaacaaaaagaaacaccttggactgagagagtgttattaggactacaattaagaaaactacattctgaaatcaagaacgcaaactgagttatcagcgaagcaagctgcgattttgttaccttctttgttccaacacacttcgaatatccctccatttcctgtgtatgtctttacgattttaccttctttaatcgaccatatgtgtatcgatttgtccaaagacccactcgctatgtactccccgtttggactaaacgccagtgagtaaaccggttcctgtgtccattgaaactacagagcatcttcccgagttctgcatcccatagctttactgttgagtcaaatgatgcacttgcaagagttagctgtttgttaggattgttagttcctggtcctgt

SEQ ID NO: 901 - DNA, 482 bp, Arabidopsis thaliana
aagaaatcaataatttttcccaacaatgatacctagaatgacagagacaagagccactccaagtgcgatcttcaatgtcatgagatgccatgtttcagctttctgaatcataacgtgccctgaagacgaagcagcatccaagttcttcttgatcttagtttgctttggatttgaaaaagataagtcactgtctcgagatttcacttctacttcttcctcttttcccgtagactcagtttccttagatttagcatctgcaagcttcactttctgttcaagctcattcaacttcgattcgagatgaacgatcacagattttttagcatcaagctcttcttgtgatttctttaaagtagcttccaactctgaatgcttatgagacaaggcttctttctgttcagaaatggctgtgtgagaagcttgaagctctttatgaagctgaattgctttctcttcaagcacatctcggtcactcgccttat

SEQ ID NO: 902 - DNA, 482 bp, Arabidopsis thaliana
tcttcggacacaggatgcggctgcgtggcttgaatatttcgagtccaaagctctggaacagcaagaagctgcacgaaatggtactcccaagccagacgcctctatttccagcaaaggccatctcagtgtatcagacctgttggattatataaccccggattctggtattaaagcaagggacgctcaaaggaaagctcgcccaaaggtcaagggaaagccaggtcaaagtccaggaccagtgtcagaagaaaatcagaaagatgatgaaattttgagtccggctcatctcactggggagagttcaagtgataaagagaacaaatccgaaacaaaatctgaagaaaaaaaggttgaaaattttgatttggaacaatcaaaacctcaagaccagctgaagctggttaagcccgaagccacggtccacgaagatgatgattctgacgaaggatggcaagaagctgtccccaaaaatcgtttttctt

SEQ ID NO: 903 - DNA, 482 bp, Arabidopsis thaliana
gtcgatgactttgagcttttgactatcattggaagaggtgcttttggtgaggttcgcttatgtcgggagagaaagtctggaaatatttatgccatgaagaagttaaagaaatctgaaatggtcatgagaggacaggttgagcatgtcagagcagagaggaacctgctggctgaggttgaaagccattatattgtgaagctttactattcatttcaggatcccgagtatctgtatctgattatggaatatctccccggtggtgatatgatgaccttgctcatgagggaggacacattacgggaagatgttgccagattttatattgctcaaagtgtcctggccattgaatccatacacagatacaactatattcatagggatatcaaacctgataacctacttttggacaaagatgggcacatgaaactctcggactttgggctctgtaagcctcttgattgtagaaatttaccttcaattca

SEQ ID NO: 904 - DNA, 481 bp, Arabidopsis thaliana
cggccgcctcgagtgttcatctattattaaataatacctctggagagtggagacattacaattaaaagttaaaatatactcatatatattggaatactgatatgtccattaatataaggaccgtaagaatgaaacaattcatcggaaaaataagcatttcaattttttctctacctatatgcttaatccggccaagaacgaaactccggtcgatggcaaccacgaggaaccgtatataaattctgccacagtgaaccggtttgcctcggccgtcgaattgatgacccgataacccggccagctcacacgttgcccgagacccgacccaggtccactgttcaaatactctccgtaatacaaagtatctaaagcaaatgttgtgttccactcgagccaacctctcgtgtgtacatgaccaccgatatacgacatcatatacactgtcctagagaatagcttccaaggtcggcctagatacgtc

SEQ ID NO: 905 - DNA, 481 bp, Arabidopsis thaliana
agcggccgcccgggcaggtggcaaagcaatcaagcaaatacttttccttcctcttcttctccaaaagtcgtttgttttcacatttctttcgattcccacttgactctccgagaaacctttgcagatcaacaaacccatcttctgattctggaaaccctaacccacccggttccgattcagacaaacgggtcggagaccgattttgatctcgaactcgattctttctcagatgaaagtatcaaaaattgagaatttgaggttgtttgagtcttaatcatctcgatcaatgtcgcgttttccccgtggatttgtggagaattcatcaatggaggaacccaaaatcgctcgtcgtccaactatttgcttcagaccaataaacccttctgatttagaacgtttggagcaaatccatcgtgacatattcccaatcaggtatgagtctgagttttttcagaatgttgtcaacggaggtgatattgtc

SEQ ID NO: 906 - DNA, 481 bp, Arabidopsis thaliana
gcggccgccgacttcgtcttcctcatctatcatcgtcgtcgtcaaccttatttatctcttaatttatcattaaaaccaaaaaaccaaaaaaaaagccttagctttcgtttcttcaatcccagcaaaaaaaatggctcaggttcaagctccttcttcacattctcctcctcctcctgctgttgttaacgacggggctgcgacggcttctgctacccctggaatcggcgtcggcggcggtggagacggagtcactcacggtgctctttgttctctctatgtcggagatctggatttcaatgtcaccgattctcagctttatgactatttcaccgaggtgtgtcaggttgtatctgttcgtgtttgtcgtgatgctgctaccaatacttctcttggttatggttatgtcaactacagcaacaccgacgatgcggagaaggcaatgcagaagttgactacagttatctcaatgggaagatgattc

SEQ ID NO: 907 - DNA, 481 bp, Arabidopsis thaliana
  misc_feature (1)...(481): n = A,T,C or G
gccatggcgatgaagaatctactgtccctagctcgccgatctcagaggcgtttattcctcactcaagccacacgatcttcctcttcgttttcagctatcgattcggtgccggcttccgcatctccgacggctctatctccaccgccgccgcatcttatgccatacgaccacgcggctgagattataaaaaataagatcaagnagctcgagaatcctgataagannttccttaaatacgcatctccacatccgatcctcgcttcccacaatcacatcttgtcagctccggagactcgtgtcactaccttgcccaatggtctacgagtcgctactgagtcaaatctctcggctaagaccgccaccgttggagtctggatcgacgctggatctcggtttgagtccgatgagaccaacggaacggctcattttttggagcatatgatattcaaaggcacggataggcgtacagtgagagcgttgg

SEQ ID NO: 908 - DNA, 481 bp, Arabidopsis thaliana
ttacgatctaaagagcaacataaacaagaaaaggaatcatagacctacagaattatttgattactaaggtcacagattcactgctaaattgctttcacattgaatataagcaaaagagccttaatcctctcaggaaccaacaagggtccctctataaatggctaggccgtcttttaccagaatctgtccttaacctcttcaccggatttgcccatcccacagaatcaccggccgcaccgctgttgtttggatgagtgggttggtttggccaccgctgctgttgtgctagccttgtttcccttggaactccaccagacacaggacttctaagaccacgaccaatcattgctggaggtggtgaaactgggctgctggagccaccagttcgggttttcggaccagacttctctcggtctttcctctttttcttgcagattactaattcccctggatgagctaatattggggattcatcagtgtg

SEQ ID NO: 909 - DNA, 481 bp, Arabidopsis thaliana
cttctttttccggcataacttctgtgttaccctaaactccataacctgtttcatcgataaagtgcctttgcttctatctctgtcactcttactacttgttgaacaatattctacaaaaaaatgtcgggaagaagatcacgttcgaggcaatcatcaggaacttcaaggatctcagaagatcaaatcaatgatctgattatcaagttgcaacagcttcttcctgagctcagggacagtcgtcgttccgacaaggtttcagcagcgagggtgttacaagatacgtgcaactacatacggaatctgcatagagaggttgatgatctaagtgagaggctatctgagttactagcaaactcagacactgcacaagctgctttaatcagaagcttacttacccaataattcctatctatctttttcttcttcttcttttttttgtttactataataataataatagtttgcgggtttttttttctat

SEQ ID NO: 910 - DNA, 481 bp, Arabidopsis thaliana
ctctcctcctcctccttcgtcttcttcttcgtctcctctgcaaacgacgacaacccatcgaagccaaaagcagaatctgcgtctacccacgtttgaagattcgtttcttctttaccaatttagctctcccaccgaagacccaggattctctaaccggatcccggaacaattcgacggagagccacgcgaattggtgttgccgagagtagaagacaacaacaaagggttggcaatttcgtcgaacatgtggtgggcagatctgaaagcggctcttgggcaacgaatcaatattgagggtatcgtttcttcggtctccgttgttgttaaagatcgtcaatttgttcttccgcatgtttctgtgaaagatttaagatacattgattgggaagtgctgaagagaaagggcttcaaaggtgtagtgtttgataaagataacactcttacggctccttattctctagcgatttggccaccattacgt

SEQ ID NO: 911 - DNA, 481 bp, Arabidopsis thaliana
tctatctttctctctcgctgcttctcgaatcttctgtatcatcttcttcttcttcaagtgaaaaatggccgatggtgaggatattcagccacttgtctgtgacaatggaactggaatggtgaaggctggttttgctggtgatgatgccccgagagcagtgttcccaagtattgttggtcgtcctaggcacactggtgtcatggttggtatgggtcagaaagatgcttacgttggtgatgaagctcagtccaagagaggtatcctcactctgaagtatccaatcgaacatggtattgtaagtaactgggatgacatggaaaagatatggcatcacactttctacaacgagcttcgtgttgcccctgaggagcacccagttctactcacagaggcacctcttaaccctaaagctaacagggagaagatgactcagatcatgtttgagacattcaatgtccctgccatgtatgttgccattcag

SEQ ID NO: 912 - DNA, 481 bp, Arabidopsis thaliana
aaccctaatcctctctgaaaccctagacatcgcagctgaaaatgaccggagaagtcgtcaaccctaaagcgtatccgcttgcagattctcagttatcgataacaattcttgacctcgttcaacaagctactaactacaagcagctcaagaagggtgctaatgaaggtatccgcttgttactcatgtgtgtttgtctctcttatttattgagtttaatgtttgtgaagttgttcctgatttatttaaatttgttcatttcagctacgaagactcttaatcgtggaatctccgagtttgttgtcatggctgcagatgctgagcctctagagattcttcttcatcttcccctacttgctgaggataaggtttgacttcttctttctctgggtttctcttttattatacaccagtttatttagcaaatgagatatttgtttccttagttcatagaagagaattaagtttacttgctgaggatata

SEQ ID NO: 913 - DNA, 481 bp, Arabidopsis thaliana
gaaacaaaggagtacgtggagttgattttggtcttggtattggatttagctcggaatctagtaggacaccttcttctaaagctgcaccaagtagaagtggggcaatcaattcagtgagaactggagtaatggcccaattcaagaatagttttgtcgctgcaacgccatcaaatccacaaaaccaagcttatccaaacaagagaccatccctaatgggctttgtctcaggtggtactattggtggagacatgggtagaactcagagtcaagctcccccagtagcacctactcaaaacgcctcatcacacaactccagccagaatcactcacagagttctgagaatcggcctagagagaggaagagaagatctggttgggataattgagtgagccacgttttgcatgatgatagtggaagtgttttgcacaacaatgtaatgaatgttgtataatttgttttatccaaaaaaaaaaaaaaaag

SEQ ID NO: 914 - DNA, 481 bp, Arabidopsis thaliana
cttgtttcctcctgacactgatacacccgggtttgaacaagaactgaagaagaggccagaactaacttcaatcatagccgcatcatcgggttcaatgaaaaccaaggaagtggccaagatatgttttgatggtatcaaagcaggaaaatttacagtgacatgccattttattggcttcttactatcaattgctagcaccggcatgtcccctcagggatcgttttggcttgcgctcattgaagttatattcggtggtctaataagattcgtcagcttggttttccaatggcaatggtacaaaaccatagaaaagtggagcaaagaaaaacaagtaaatagtaagttagcttaggttattttgtacaatggtactaatactatatgatcagtctcttgtacagtgaacaggctcatgtgtttgtagttccaacttcggcttctctgttttcaatttgaataaattgtgaaaaaaaaaaaaaaa

SEQ ID NO: 915 - DNA, 481 bp, Arabidopsis thaliana
ccacgcgtccgggatgtctttgagacagatatggatcatgaaattggttctgatagagataacacaagcgctgtgtttgaggaagctgagagtatctcagtgggtgaattgattaaaagtccggttttcagcgaagacgagtcatcagatagctccctctggattgatttgggtcagagtcctgctgattctgataatgcaggtcatctgaacaagcaaaagagccccttactggttcgaaaaaaccacaaacgaagaagctcgcctaaaccagcttcaaaggctaataatggcagcaacggtgggaggcatgttctctctttcgatgctgctgttttgtcagtatcacatgaagtgggtgaagaagtcatagaagaagaaaattctgaaatgaatcagatagacacaagtcgtcggttgcgagttactgagatcgaagaggaagaagaagaaggagggagcagtaagctaactgctcatg

SEQ ID NO: 916 - DNA, 481 bp, Arabidopsis thaliana
agaaacccactttatttagattttagataagcaaagcacacagatgcattatccttaagaaaaacaaaatacaacactagaccacaacttcataaactcacaacataaccttattcaaatttcagggatatccagattggtttcacatcatttggctatgggcgcaacattgactccaagtttgtaaagatattcaccagcttgtccatagaaaccaacgattttgtggtctttcttctccagtacgaattcagttcctccctcgagtccatacgggatagatgttctcttgtttgttttaaacttaagcgagacgattgccggggcatctacactaaaaatcttgtcatagtagcccgacacggcagtgacatactcatctggtccaagcacaaactcctctgctccaagcaatgtcttcttcccatgatcacttccaaggacaggctttgaagccttttcatagtcagctttgaaatag

SEQ ID NO: 917 - DNA, 481 bp, Arabidopsis thaliana
  misc_feature (1)...(481): n = A,T,C or G
cagaaaacggaactcatgctgatccaaagacgccagatctcaagacttcatcggaagctcaaggagacactaatgatcaaacgaagaagaagaagtcgtacgcggtggagatcgcttgcgtctgtttcttaatcgcactcgcaatcaactacttcgttggtaaacgtgagaacgagagtctcgcattagcttgggcggcgaaatttgcttctaaggatacaatattccagaagaattttagtatgcttggagttagtgaattagaggattcgccattgttgttaaaagaagccttaaatgtgttcaaattctacgcgagtggtcgtaggtattgccatggattgttagctactatggagcttaagagtagacatgatttgatctctagggtgtttaatttggttnntccttgtaaagatgagatcacttttgaggtttatatgaatgaagaaactatggatcatgttgtgtttgctatgac

SEQ ID NO: 918 - DNA, 481 bp, Arabidopsis thaliana
cggccgcgagaaatagtttatacacaaatgttgttacatttaaaacacaataagcaaatatggtacaaatcgatgcgactcgacgacaagtttgacaacagagacgcaaagaacacacagatgttacattggttttattggaagctttttgtcacggagtttagttactaacaaacaggaaatgtgaatcttgtgggacaaggaaaccttttgcattcaagcagaagcaacagcttctgaaacccttccattaccagtctctgcactgagactgtcgtagtagtcaaccaacaccttccaaccagagggacacatgaaaccatctggtgggttctctttcttcttcgccaacccacgcatcttggttcctgatatgaagaggaagtcttgagacctggaaggatcaaagaaggccattttcccctgagttttgtcatatgcagcgaccttgaagggtagaatgttgaggcgttcaagtcct

SEQ ID NO: 919 - DNA, 481 bp, Arabidopsis thaliana
tcttctggttgcgtttgagtccgtacgaaaacaaaagaaaagagagagatggcggaagagaagaaagctccaatcagtgtctggactaccgtgaagcccttcgtcaatggcggtgcctctggtatgctcgctacttgcgttatccagccgatcgacatgattaaggtgaggattcaacttggtcagggatctgcagccagtataaccaccaacatgcttaagaatgagggcgttggtgccttctacaagggattatctgctgggttgctgaggcaagcaacttacacgacagcccgtcttggatcattcaagttgctgactgcaaaggcaattgagtctaatgatggaaagcctctaccgctgtatcagaaggcactatgtggtctgacagctggtgctattggtgcttgcgtcggtagtccagccgatctagcacttatcagaatgcaggccgataatactttgccgctagctcagcgca

SEQ ID NO: 920 - DNA, 481 bp, Arabidopsis thaliana
tattatttatgggacaaggccaagccacaaggacataccaaagaaaaaaacaagagaaggtgataaaaggggcaaaaaaaaaaccaaacaaacaaacaaagaagatcacaaagagtagtaaaagaaatatttacaaaacagttaaaaaaacaaacaaacaaaaccccttttcttcacctcgtcgcttgtcataagccaaaccttccaaaagtaactactagttttttactaccatagaactgaagaagaagtcttcagttttttactccatactgtctcttttaacttctcgagttttactttttactatacgactctcaaaactggcatgaagtgccaagtctctgtctcttactcaacgttgcggttttgcgttttgcgaaagccggtccaagtaactcttggaacctctcgaggaagagaacccactcgtcttctttcatgtctgctactttcacaaagcttgcactcactggaagct

SEQ ID NO: 921 - DNA, 481 bp, Arabidopsis thaliana
ttttttttttttttttttttttggaattcactactttcaccattttacattaataatcgagcacaaagcatcgaaaccatttttttacaacaaaggccgagaggacacatttcttacagaaaaaaagaaacctctccaagaccaatatcgttgttacatgattacaacaacaacagcacaaaagaaaagtaaatacaaattattttcagaacaaaagtagtcgagtcactccaatgtaagaaaacaaaggactttttactccgtggtgattttcaaaacagtggtaagtcttggcttcttgtatcttctaagaagcaaagaagagcaaacaacactaaccgaagagagtgccatacatgctccggctgcccaaggcggtaattgcacccgcagaaccgggaaaaacactcctgctgctatcgggattgacactacattgtacgccattgcgaagacgtaatttaatcggattcgtgttaag

SEQ ID NO: 922 - DNA, 481 bp, Arabidopsis thaliana
  misc_feature (1)...(481): n = A,T,C or G
cttctttactttttcttcttcttttagatcaaagaaatcgttttgtgcagatttgatcttgcgttaattttctaagcaaaatatggcgggagaagatagccgtgaagctcaacgaggcgacgaatatgaggaatcgagtcctctcttgaaggtgaacgagaatgacggcaagatctgctcgaaaagagatgccaaggcggcgcctcttgtgcctccttccgcggcggaggaatacggctggacggcggatggattgcctgtgagccatggtagcgtgattggcgagccgatcaggagaaaccagtggaattctggtctttttacctgtcttggtcgcaatgatgaattttgcagcagcgatctcgaagtttgtcttcttggaagtgtggctccttgtgtgttgtatggaactaatgcagagagannngggtctgctccgggaacattttcaaaccattgcttgacgtatttgggattgtac

SEQ ID NO: 923 - DNA, 481 bp, Arabidopsis thaliana
ccacgcgtccgagcaatgataatgaaaaaaacaactcaagcgtatcttcttctaagtttagttcatatacttctatgtctatcctttcagattcgtgctatacgccctcttctagctgagccgccaagtcaaatcctaaatccaccaccaccctcgcccgtatggccctctccaccatgtggaactaatatcgggagtcaagttacggcagtaggagagaattcttgcagacaaattccgaggcctcctaaaaccaaaaagaagaaaattccaaagcctcttaaaaccaaaaagaagaaaatctcaaagcctcatgcagcagttccgtgatctccaaacaagagtgtgtgggaaaggctttcacagataaaactaccacttagaatccttttttggaatacacttatcctttgaaaactcatcaagtattttattggattgtacaataaatcctcgttcttcaaaaaaaaaaaaaaaaaag

SEQ ID NO: 924 - DNA, 481 bp, Arabidopsis thaliana
ttttttttttttttttttgaaacagaacaaacttttatttcatcttagaacaaaacaccatatccctcacgcattccgattacattcatcaaatccataaatcaaaacaaaatagataaatccaacacacaatcacaaaacaaactcaagcaacttgaacttgaattgtctttggtttctttggttccggaggaggaagtttctgaacagtaaccttcaacacaccgtcatgacaaacagcagagatcttgtccaaatctgcattttcaggcaactgaaacttcctcatgaacttacccattcttctctccatcctcacatacttcacaccttcgttttctttgttctctctctgcctctctccactcaccacaagcacattgtcgttctcgacctgaaccttgatctcatctcctttgattccaggcatgtccacgacgaatgcatatgcgttagggtgctcgatgacgtcagcaggtgt

SEQ ID NO: 925 - DNA, 481 bp, Arabidopsis thaliana
cgttcttctcttctctccgccgatttactccgccggtcacgattaccgcgacgctctccgtaaaagcattctcttcttcgaaggtcaacgttccggtaaactccctccagatcaacgcttaaaatggcgccgtgactcagcattacgcgacggttcctccgccggcgttgacttatccggtggttactacgacgccggagacaacatcaagttcggttttccgatggcgttcacaacaacgatgctttcatggagtataatcgatttcggtaaaaccatgggacctgagcttagaaacgccgtgaaagctgttaaatggggaacagattacctccttaaagcgacggcgattcccggagtagtcttcgtccaagtcggagacgcttactccgatcataactgttgggaaaggcctgaagatatggacactctccgtactgtttacaaaatcgatagagctcatcctggttctgacgtcgct

SEQ ID NO: 926 - DNA, 481 bp, Arabidopsis thaliana
gcggccgcagtagagccagctcttgctcctcctgctttgagtcctgttccaatgcctaggcctaagaggcccagatcaaatatagcaccttcatctcctgactcttcgatgcttaccagagaaggtacaactaaggcaaacatggaccctttaccagcaagcggactttcaagggtcttgcaaggtcaagaatactcgaccttgaggacgaaacatactgagagtgtagagtgtgatgctcctgagaattctgttgtctggcaatcttcagcggatgatgataaggttgacgtggtttcgggttctagaagatatggatctgagaactggatgtcctcagccaggcatgaacctacttacacagatttgctctccggctttgggactaacatagatccatcccatggtcagcggatacctttttatgaccattcatcatcaccttctatgcctgcaaagagaatcttgagtgattcagaag

SEQ ID NO: 927 - DNA, 481 bp, Arabidopsis thaliana
  misc_feature (1)...(481): n = A,T,C or G
atggatcctctagagcggccgcccttttttttttttttttttataacaagattattattattaaatcataacattttaaaataacagacaaacaataagaatagggttgtattattaagtgtttaagaataagagaaagaaaacaacacatgttgttgagaagactctcttgttttcccagaggtatcccaatgttttcttctttattggtgagtattaggattgagactaaagggcagatgatccagctaaacgccttcttgatgcattcgaaatggaaacttgaccaaacttatccttatccgaatcacttgataacgttcgttctctcactggctcgtaatgcctcatccacactccagtataggcctgttggggtctcatgatcctagtgtcaggatcatctaacgactcacgccagnnngacaagtatccagccatacgcgggactgcgaacaggactgtgaagaattctggtggg

SEQ ID NO: 928 - DNA, 481 bp, Arabidopsis thaliana
  misc_feature (1)...(481): n = A,T,C or G
ccacgcgtccggaacacggaaatattggcgcccagataatcttcttctgtnnnncattttaagtcgccgactccaatcaacagagcccagttattccattttatcgaattaattagggttcagagagatgggtaggaaaaagaaatctagggcttcgacaaccgaagaagatgagattgagatggataatgctggcccatcctctgagacaagtctttacgaggttcttggagttgaaagaagagccacttcacaggaaataagaaaagcgtaccataagttggcattgaagcttcaccctgataaaaatcaggatgataaggaagctaaagacaagttccagcagctgcaaaaagttatatcaattcttggtgatgaagagaaaagggcagtctatgatcaaactggctcaattgatgatgctgatattcctggagatgcgtttgagaatttgcgggatttcttccgggacatgtataag

SEQ ID NO: 929 - DNA, 481 bp, Arabidopsis thaliana
ctctatcacgccgagtgaatccaaatttaagaagttgatagatgaatgcaattttctaatcacagaagaagagaaagatttggttcaaccggtgccttcgactttgccttcaagtgtgacagcaccaccagtatctgaacttgatgtcacccctacagccaagtacaggcacgagtactaccaaaagccagaggaagttgtggtaactgtttttgcaaaaggaatacccaagcagaatgttaacatcgactttggtgaacaaattctgagtgttgtgattgaggttcctggagaggatgcgtattatctccaaccgagattgtttggaaagataataccagataagtgcaaatatgaagtattgtcgaccaaaattgagatctgtcttgcaaaagccgatataatcacatgggcctccctcgaacacggcaaagggccagcggttttgccaaagcctaatgtctcatcagaggtttcacag

SEQ ID NO: 930 - DNA, 481 bp, Arabidopsis thaliana
ctatgctcacaacaacaacctcattctcttgttgctttatgttgatgacatggtgattactggtaacagctctcagaccttaacaagacttctctcaacattgaacaaagaattttgaatgactgatatggggcagcttcattattttctgggtatacaagtccaacaacatcaacacggcttgttcatgtctcagcagaagtatgcagaggatcttctggttgcagcttcgatggcagactgcactcccttgcccacacctctcccggttcaacttgacagaatatcgaatcaagaagagttgttctctgatcccacttacttcaggaacatcgcaggcaagcttcaatatctcactctgacgagacctgacatacagtttgctgtcaacttcgtgtgccaaaagatgcaccagccaaccatgtatgatttcaatctcctgaagcgtattctaagatacatcaaaggtacaataacgatg

SEQ ID NO: 931 - DNA, 481 bp, Arabidopsis thaliana
  misc_feature (1)...(481): n = A,T,C or G
ccttccatatctattgttctctctctcttcatgcccgaacgcatcgggtctcaaaaaccattgatacagacatcgatccttgtcaactagtactgatctataaatcttataaaaatctgtagagatatggccgccgcagccgtttcctctaaccctcgcaccgttgaagagatcttcaaagattattccgctcgtcgtgccgctcttcttcgtgctctcactaaagatgttgatgatttttactctcaatgcgatccggaaaaggagaatttgtgtttgtacggacaccctaatgagtcatgggaagtgaatctaccagcagaggaagtgcctccggagctacctgagcctgctcttggtatcaatttcgctagagatggtatgcagaggaaagattggctttctcntgttgctgttcacagtgattgttggttgctctctgtttctttctactttggagctcgtcttaatcgcaatgaga

SEQ ID NO: 932 - DNA, 480 bp, Arabidopsis thaliana
cacgaacgtttgatcttatccacgcatggaacaccttcacagaaacccaagcacgtggatgcagctttgaagatctgcttatcgagatggatcggatactacgcccagaaggatttgtcataattcgtgacacaactgacaatattagctatatcaagaagtatctgacattattgaaatgggataaatggtccacagagacaactccaaaaggtgatcctctgtcgaccaaagacgagatagttttgatcgccagaaagaaactttggagcttgcccgccatttcagtgtcctgaaatctaacagtcaacaggcgaatgaatgagatttacagcatcagaggcgcgtagctgaggaaaatactcagcaatggagaagtgtaaattacacgacattcatacatagttgttaacttgttatgcatttgttgtaggaaactgcaaaatcttcttattttgcgattttcatgttccgcggccg

SEQ ID NO: 933 - DNA, 480 bp, Arabidopsis thaliana
taaaatatgtaacatcttcaaattaatctaattttgtccaaaaaaataacgtacacaaaatcgcacaccacaataatgtaacaaaaaatataaagatttgtatttataagacccaaattaattaacaagctcttgacataaaaaaaaagggatttaagagaggagaggttcaacacgtgatgtgaggccttcctcttcatcttgagcaatctcacttaaaccgttgcttaaaccaaccggtttggcatttctgtaaattccataaagtatgagttgcattgtcccaaacacaaaccccactccatttggcacgagtaagaaaacgtcgtgttggagtaaagcatagacagcccaaatcgcgccgtttaagaagaggaaaaacgacaaccaaaacggcatgtatttcacgctctttgttgtcactactgttttcattgctgaaagtggagaaccatacattataatgtttcggacgcgtgg

SEQ ID NO: 934 - DNA, 480 bp, Arabidopsis thaliana
aattcctctgacgaagaagaagaggatgagatggatgcagctagaaccacagaaattaatatggagataaagcgtatcttgacagaagtccttcttaaggttacagatgaattatttgatgaaattgcaaccaaagtcattaacgaagatgaagcaatagctaaagctgatccactccacaaggcttcggcaaagattttggtctcggtagaaggtgcaaatacaaaagctagttctggctctccagcagatgtgctaggtcttgctagctatgcctctgatgatgatgatgctgatactgatgctgcttctgacgcgaatgctgatgaaaatggagtggagagtcttggtgtggggtcaagacacaatgttagtcagcagccaagcactgagaaacttcctgaccctgaagcaatggccagtgcgaaattggatccagcagttggagtcaatgctaattctggcaagaatagtaagtca

SEQ ID NO: 935 - DNA, 480 bp, Arabidopsis thaliana
  misc_feature (1)...(480): n = A,T,C or G
aacaaacaccgtttctccggcgaaaagctctctgttactaaaaactcacagaacctaaaaatggcggatcaagctatgacggatcaagatcaaggagctgttactctctacagcggcacagccattaccgacgcgaagaaaaaccatccgttctctgttaaggtcggattagctcaggtacttcgtggcggcgccattgttgaagtttcctcggttaaccaagctaagctcgctgaatccgccggcgcatgttctgtaatcgtctcagatccggttcgatctcgcggcggtgttcgtcgtatgccggatccggttctcatcaaagaggtaaaacgagctgtgtctgtacctgtgatggcacgagctcgcgttggtcattttgttgaggctcagatcttgnaatctcttgcggttgattacattgacgagagcgagattatctctgttgcggatgatgatcatttcatcaacaaacataat

SEQ ID NO: 936 - DNA, 480 bp, Arabidopsis thaliana
cgaatcaagattaaaacctcgtttagttctcaatttcagttctgtggatccgtgcgtgacctcaagttttttttttttttttctgtctcgaaattcagaatcgtagaggtgttgaaagttgaaaccttttttttggtttgcttggttaatgggtttcttcaaacttgatcgataattggatttgaatcaagggttttagtgttcttgctttgtgtattcgtttggcaatttgggataatgaatggtttgcaagaagtttgttcgtcaagtgggtcggtgatgatcggactaccagctgaagaagacgaaaacgccgcacattcgtcggaggattcatcttgccccgacgagtcagtgtcagagacagagctcgacctagctttgggtcttagcattggtcgtcggaaggttcgatcgtctttgtcttcctcgtcttcttctctgaccagggaaagtgggaccaaacgctctgctgattct

SEQ ID NO: 937 - DNA, 480 bp, Arabidopsis thaliana
cgtccgctttctctctctgtctttccttgttcaaccctcgagagattacggatagtgaaagagaagctacaaaatttcccaatttatcaaaaaatagaaatttcttacttttttcaaaattcatttctccccaaaaaaaatatcttgtgaaaactgcaactgtgatccatggcggaggatatggctgccgacgaagttacggctcctcctcgtaaggttcttatcatctccgctggtgctagccactccgtcgctcttctctctggtgacattgtttgttcttggggtcgaggagaggatggacagttaggtcatggcgatgcagaggatcgaccttctccgactcagcttagcgctttagatggccaccaaattgtttccgttacctgtggtgctgatcacactgttgcttattcacaatcaggcatggaagtctacagttggggatggggtgattttgggagattaggccatggtaac

SEQ ID NO: 938 - DNA, 480 bp, Arabidopsis thaliana
ctttctccatagtttaaagcttcgtcgttccgtcaccagaatttcaactactttgagttgattctcgttggatttctcacgatgggagacagcgggaagcttgaggcaacgatagatcggcttctgaatgaagagaagcagatgagactcgccgaaaacgtagccggtacaaggaaagccgccactgagattcttcagctttgtttcgatgctaaggattggaaacttctgaatgagcagattctcaatctctctaagaaacgtggtcagctcaaacaggctgtgcaatccatggtgcagcaagcaatgcagtatatcgatcagacaccagacattgaaactcggatagagcttatcaagacgctgaacaatgtatctgctggaaagatatatgttgaaatcgagagggcacgtctcaccaagaaacttgctaagattaaggaagaacagggtcagatagctgaagctgcagatcttatg

SEQ ID NO: 939 - DNA, 480 bp, Arabidopsis thaliana
cgacagggtcaggacacctgtggagaattccctgagggatgcaaaactcagcttcaaagatattgatgaggtgatccttgttggtggatccacacgtatccctgctgttcaggatcttgtaaggaagctgacaggaaaagaacccaatgtctcagtcaatcctgatgaagttgtagctttaggtgctgcagttcaggccggtgttctatcaggagatgtgagtgacattgttcttcttgatgtgacgccgctatcgcttggtttggaaactcttggtggtgtcatgaccaagatcattccaagaaacaccacacttccaacttctaagtcagaagtcttctcaactgctgcagatggacagacaagcgttgagattaatgtgttacagggtgagagagagttcgtaagagataacaagtctattggtagcttccgtcttgatggtattccacctgcaccacgtggagttccacaaatcga

SEQ ID NO: 940 - DNA, 480 bp, Arabidopsis thaliana
taagttccaagaccgattgcactcattcccatatttccacaaagcagcaatcagagctatcaggtgctacctgaaattgcatgactctcccaagtcaactgctggagaagatgaaatgtcaaagttggctcctgctcagaagaagaaaatcaagaagcagaaaaaggcagaagcccgagctaagaaagaagctgagagtaagagtgaagaatcaactgccagtggtgcctctaagtctggcaaacgaaatgtgaaacctgtagacccagatcctcatgggcaaaagttaattcaggttgaggagccaatggcagaggcttcaaagtacttgagactactccagaaacattcacctaattctttggagactcatttactttcctttgaggtcaatatgagaaaacagaagtttctgcttgcattccaggctgtcaagcaattgcttaaattgggtgcagagaaccctgattcacatcgttc

SEQ ID NO: 941 - DNA, 480 bp, Arabidopsis thaliana
taatattccgttaaattatagtccaagcgacaagatttcagtcatacaacatgaagggaaaaatgagaataatattaatgaataaattgaattatactagaatttgtaaccaaacataacaaaagaattacgctagaatattattttctactaccaaagaccaaacattggacttttttttagtattcagaccatagtagagcaagccgacgtcgtaggatcatacaaagcaggaagcaaaaacttcctgccgtttgcaccatacgcattaaaactacctcccgttgtagtatccacaagcaaatctccagcgtaaccaggataagctcctttaccataaacgccaggacaagcagaagcagcttcaagcggtgcgttttgtggaccttgatagtaaccattaccaaaagggttcgttgcggttccagctaaaagactagctaagttaataaccatcccatcgagtcccacgtcattgtt

SEQ ID NO: 942 - DNA, 480 bp, Arabidopsis thaliana
gaagctaacaagttgacaaatttcttcgttataagagagatagatgagttgcaggagagtgctgaagtcgatacaagccttggcggctcatagtttactcttctgtttcacgcttttattggtgcttaaactcgatcacaccgtctcttcctcatggtggatggtgtttttcccgctgtgggcttttcatgcagttgttgcaaggggcagattctctcttcctgctcctgttgctccacgtaaccgtcattgggctccttgccatgctgttgtcgcgacaccgttacttgtagcatttgaattactcctctgtatatacctcgagagttcttatgctcgttggccaccagctgtcagtttgaagattgctttcttaccattgttggcttttgaattaacaatactggtagacaatttgagaatgtgtcgagcattgatgccaggagacgacgacagcataactgatgatgcaatatggga

SEQ ID NO: 943 - DNA, 480 bp, Arabidopsis thaliana
ggcttaaaactctctctctctcttggtcttcctcactcttaacgaaaatggactctctaacactcttcttcaccggcgcactcgtcgccgtcggtatctactggttcctctgcgttctcggtccagcagagcgtaaaggcaaacgagccgtagatctctctggcggctcaatctccgccgagaaagtccaagacaactacaaacagtactggtctttcttccgccgtccaaaagaaatcgaaaccgccgagaaagttccagacttcgtcgacacattctacaatctcgtcaccgacatatacgagtggggatggggacaatccttccacttctcaccatcaatccccggaaaatctcacaaagacgccacgcgcctccacgaagagatggccgtagatctgatccaagtcaaacctggtcaaaagatcctagacgtcggatgcggcgtcggcggtccgatgcgagcgattgcatctcact

SEQ ID NO: 944 - DNA, 480 bp, Arabidopsis thaliana
  misc_feature (1)...(480): n = A,T,C or G
tcggaaccaaaaccaatgaactcttcaccaccaccggcgaattccgccaacggcnatacaaccaacaacggcgagaacggtcaagatctgaacttaaacttcttagacaagattcgtctctcggctaaacgagatgcgaaggaagacgaaggagaagaattaccgacggagttgaatacgatcaatagcgccggcggatttcttgtggtttctcctgataagctttccgtgaagtacacgaatacgaatctacatggtcacgatgttggtgttgttcaagctaataaacctgctccgatcaagtgtcttacttactactttgagatttttgttaaagattctggtattaaaggacaaattgctattggttttactaaggaaagcttcaaaatgcgtagacaacctgnatgggaagtgaacagctgnngatatcatggggatgatggatacctatatcgtggacagggaaaaggtgaacct

SEQ ID NO: 945 - DNA, 480 bp, Arabidopsis thaliana
cttttttttttttttttttttttttataaaaatgcaaatggctccttttcattttttgggtcaatttgaaaagaagacaatgtgctcaaacagagtattattcatttatatacaacattcaaaactaggcacaaattcatgagatgttgcggggaaacataactttctggaactagagtccatctggtctagccataccatcttctttctctaaatagctctgaacttgctcaaaggcctcaatggcgatttcagctggtgtaagatctgagacacttctataaccgagcttcaaagtaatattctccaaggaaactcttgcgctggctttagtgtatgcttcaccacgtgcatcccaaatcgttgaaagacggtttaaagccgctgtgtatgtgtcccctgactcatcatcatgtagcaatggtcttgaaccagttcctacagcagctattctatgcgctaaggcttctagaggtacat

SEQ ID NO: 946 - DNA, 480 bp, Arabidopsis thaliana
ccacgcgtccgcaagaaacgaattgtctctaaaaagaagaagatggcgaaaaatagctgtttggccaaaatcactgccggagttgccgttggcggcgctcttggcggcgcagtaggtgctgtctatggaacttacgaggcgattagagtcaaggttccggggcttcataaggttagattcattgggcaaactaccctcagcagcgcagcaattttcgggctttttctaggtgcgggcagtttgattcactgtggaaaaggctactgattcccttacattggtttagctctacaagctttaagtttgtatctctcttagtctcttggtgaaagattggattctttttttttcgagtggtattgagctttttgttgaaataactattggatgaatcgtttttatacgtttctgctactctttgtgtgaatttttcgtctctcttgggtatggtcagaaagcttcttattaaaaaaaaaaaaa

SEQ ID NO: 947 - DNA, 480 bp, Arabidopsis thaliana
aacgcttccatagtcggagatgggatcgatgatgtcaccggaggagcagacactatgattcagggagagatgaaaaccggcggtggagaaaacaaaaacgacggcggaggagctacggcggcggatggagtagtgagctggcagaatgcgagacacaaggcggagatcctttcgcatcctctttacgagcagcttttgtcggcgcacgttgcttgtttgagaatcgcgactccggttgatcagcttccgagaatcgatgctcagcttgctcagtctcaacacgtcgtcgctaaatactcagctttaggcgccgccgctcaaggtctcgtcggcgacgataaagaacttgaccagttcatgacacattatgtgttgctactgtgttcatttaaagagcaattgcaacaacatgtgcgtgttcatgcaatggaagctgtgatggcttgttgggagattgagcagtctcttcaaagcttaaca

SEQ ID NO: 948 - DNA, 480 bp, Arabidopsis thaliana
ttgtattctgatcaaatttctgtaatatcatcgatggagctatccaaagagaatatgttgaaatactcggcacaccttcgtgcttacaattccgcatgtggagaccatccagaactcaaatcctttgattctgagcttcagcagaaaacctcaaatctgataaactcgttcacctctgatgccaaaactgggttggtgccactgccccaacacgcagcatacaaggagttcaccaagcacctagctgaagtaaaccaacaggtgtcagactacatcattggatatggagaagtagtgtgggagaactcaactctgagatctttggtcgaaacctattttgaaagtgccaagaagactttggacattgccgagaatgtaacagaatacgtcgatgaagcaaaaaggggcgaacgttacattgtagcggccgtggcacagtttgaaaaagacaaagaaaatgatgttggcaaaaaaacgaag

SEQ ID NO: 949 - DNA, 480 bp, Arabidopsis thaliana
tttttttttttttttttttttcgctagtaaaaacagagcttttatagcgttttaggtacaacaatcaatcaatctctctctctttctatcactctccgaaacaaattaacgagaccaaatattcttaaaccctaaaaccctaatcaaacaagcaataagcttaaattaagtaaaaaaggagcaaaagaaaccgcaaattagaggtactttctaaacactttcgatgacataaaacataggaatttttctatacattaccaaaaagacaataccatttctcaacgtggttcgtggtcgtcttccctccgacccgacccgttagctccaccagacaaagaagcaagcaaattgagatgatgacccggaagataattcccaactctagctgctgaagcctcacccattgcagctgctgcggcggcggaagcttgctgttgctgctggtggcggacgaagagtgtagctggttgctgctgctgc

SEQ ID NO: 950 - DNA, 480 bp, Arabidopsis thaliana
  misc_feature (1)...(480): n = A,T,C or G
tttttttttttttttttatctgcaagtctttttccatactcaaaacagtttttacaatcatgatacaacaatctttcaagaactatatatatggatcaataatactaggtcgctagactaatctcttttctcatgattcgaagaacttgaaggcatgccgatatttacctttgttgtttgatcagactgttgtctatagatagctgctgccattttattgtagagatccatattcattgtctgtgcgaaaaaggcgctgtatggatcagataatgtggctgaagaaccgttggtgcagtctctgttacccataggagggaccatcattggtngaggaggaggaggaggaactaaacctccataaccatttccaccacctcccattcccattcttgccattgttgcaagcaacgacatctgaaactgttgctgctgttgttgctgctgctgctgctgttgttgttgttgttgttggtgttg

SEQ ID NO: 951 - DNA, 480 bp, Arabidopsis thaliana
  misc_feature (1)...(480): n = A,T,C or G
tctagagcggccgccctttttttttttttttttgcaaagaatttaagcttttagaagctatgtagattcatatagtttataaaatacatatctcactatcnnnnnngtacaagatagaactcaaataacttatgactccatagtttaaagctactactctacatggttcaccaccaaaaccacatgcccttctcagaggagttgcaaaaataatacatttcccttaattatatgcatatgtttctcttttctgtcaagggaagatataataagaatacgacaaggtttctcacctacgagccagtctctggccagctccagccagtaaagccttgccaatgatcccagagtgaaggccacaagccaatgcgacacctcctacaacaacccatttccagtccattctcaaatggtcccgttgtctcgcatattccattgctctgcttctgtcttcatctcttgaagatgattctgcagaat

SEQ ID NO: 952 - DNA, 480 bp, Arabidopsis thaliana
  misc_feature (1)...(480): n = A,T,C or G
gcggccgctctaagacctttcttctcggcatgttgcttccacagtgggatgatggagtttagatacaatatttgtttattaatancnaacaatcaaaaatagatactaagtttttntgttttccaaagctcaaacctaatgtacaaattcagtaaagctttcgacaccatctcacctaaatatcttggacctttattggtgcccacttctcatgaatccaagctccaaagaagagaagctaagtaaacactaggccaaggtaaaccaagatatatgcttttcgaaggaacaagcaatgaaaagctatagacttccatgtgattaaatgcaccagcagacagatcccaatctcaaaagttatctagctatagccactctgtagttgagaatcagatcctcaggtttcttccatacatatgcccgtacagttgctaaactcatatctggagataagacctggctattacataagatctcaat

SEQ ID NO: 953 - DNA, 480 bp, Arabidopsis thaliana
agcttgatatcgaattcgcggccgcaaaagactctctctctcccatttacatctcttcatcttcttctctttctgcattttgtgactaaatttgttccgatctccgaaaaatatgaaatcttattagaaaaataccggaaaagaaacagattagtacattcgattcagcaccttcaacggttgcagaacacaaaataagaggaattgcttgattatagctatggaagaagcaacaaaagtgagttcagacgtccctcaagctaaggaagtgacaaaggaagatactgtcatggagaaagaagaggaggatacaatatttgatggtggatttgtaaaagttgagaaagaagggatcaacaaaaagtatgatgatgatgatgatgagaaagcagagaagcagttgaagtctttagaagatgctttgcagttacatgatgttaaacataaggaactaactgaagttaaggaagcttttgatgg

SEQ ID NO: 954 - DNA, 480 bp, Arabidopsis thaliana
ttttttagaactaaaaagctcatttcaactatatatacatcagagtatgctcttttaccttagaactatcggagcaaatttacatatcacaaagaggaatcttattgtaagagccaaaataaaaaataaaaaaataaacaccttagaacaccacaaaagagaaggtcttttaccttactatgtatacccatcagcggtataaacccttaccgcgctgatcaaaccgcaactattgaacaactatagttctactcactctcattccttcaccccatttgaggaaaactttagcaacagatagataaaactatctcatatctgtgtgttgaaagcttgttcgttatctccgttgttttgcctgattcttggattgatggggtttttgttttaccataaaccaagagggctctaggtgtagaattacctcagcttcttctgtatgtatgtatttatttcagaccaactgtagaactttgattg

SEQ ID NO: 955 - DNA, 480 bp, Arabidopsis thaliana
tttttttttttttttttttttttgtaaaacttgaaaacattatcttacaatagtaaagcttgtttcaagtaatctctgtaaacaaacaaaaatcccaaaatgtatgtttttcacaattcgacagcaacaaacaaacactaatgtttgtcgtaacaataaatataacgtgaaaacattattctatgatacatttttgtacagaaacttcgatgtgtctctttagccagtgacatagtaatccattttctccggtggcaagttcagaaccgattcgtcaacctcttcgaaaggaacgaagacgaatgcagtcatacccctcttgtgtgagacggcaggtatatccgggttgtgagtttcatcgtcttcccaaccttcaactaacccaagaatgtcttcttctgtgctgcttatttcctcatcgttcacaccacttgtcacaagtgacagcaaatccatcctgttattcgctccaatagctgt

SEQ ID NO: 956 - DNA, 480 bp, Arabidopsis thaliana
gacgtcgcatgcacgcgtacgtaagcttggatcctctagagcggccgccctttttttttttttttttttatgaaaatctgatcattggaaaccgaacaagtgttagttgaaaagtttacaaaacacagtttaatcaatcaactatcaaatcccaacttccatttacacaaacaaagggcactccctgtttttttttttttcagacttaggttacttttgccccaagaaacaaaatttatcgactgaagcaaataatggggagaaagatccacagttggaaactataaaggtgtagtcatataagttaggaagtttaatcaaagttctgctctgcttttacttctcttcatcttcgccttgaatctcgacttcaccattagtgtctctactgtgtttatgaagtttccaatggccatcacaaccagaagaatgccacaaaccaatacctgccattcagcgactacccccatcaacactgtc

SEQ ID NO: 957 - DNA, 480 bp, Arabidopsis thaliana
cctcttagggtagaagaaggacgaaaatcggaggaggaagaagaagatcgattcgatttgtgatcaacgatgagctccttcaatggaaacagcaacatcgacaacctcctaatccaaaccctacttggacgtctccaaattcgtccccctaactctcatttcctctctcaatccctagacgacctcctcttcaaatccgacgacagcgacggcgatgatgacggagaaggtcagaccagtctcgacagagaagaagctaggcttgagaaagagctaatccgagtcatcgtctctggtcgaagcgattctctcaagccgaattcaggtcaagccgtgacagtcaacgaacaccacatctgcgttgggtttcatgaggatgaggaatcggattatcgtgtttgggagtggcatggtcatatcatgttgtttgatgaagagaatgggtacacgcctgagtatatctacgggaattacttcgag

SEQ ID NO: 958 - DNA, 480 bp, Arabidopsis thaliana
  misc_feature (1)...(480): n = A,T,C or G
tttctcccttttcttcaatcaatctttgtcgtctcttccgatctgctcaatcacactactagccgttgttttcccgccactttctagcttcaacacgattcgccgcgtatccgaattcctataatcgtctttggatctgctttttgaaatttgaaattttgaaagtttttggtcggagaagtaatggcggaagcgatgaattcgtcggagaagaaagatgagagctcggaggagaagggaggtgagcttttgttctgtggtgctacggcttgggatatcattggaaaacgaaaaggtgcgatggaaggtaacttggtctctcctactcggctaaggccactcgtcggcgttaacattcgattcgtcgccactggttgcgcttcgtttcattgtgtggcattggacgttgaaggtcgnngttacacttggggacgtaatgagaaaggtcaattaggtcatggtgatatgattcaacgtgat

SEQ ID NO: 959 - DNA, 479 bp, Arabidopsis thaliana
  misc_feature (1)...(479): n = A,T,C or G
attagaaggtaaatgctagtattaacttcaaatatccgtcaaaattttcaattattttcagtgttctcataatctaagcccttaatgttacaacaacaaaacaaccagaaagacgttgtgaaagaaaagaccaaacatcaaaccacagtttctggttatgaaaacaacagtcaagtggtagagattctgatgccactcagaacatagcctccaaaagaactcatctgcatgtgagggtgagatcttgaaggaagcacctgatattcgcgtnnnnatggttctgttatttgcagattgatcgccattttaccctgttgaagcttgtgcatacatgtcgccagcggctgtaaatactgatgatatattgcaaaaggagcagagtaggacagtagtggcaatacatccttagctacgatccatgggtcttggtcttgcgcagccatgattagactcgaaaaaccgttttcttgccacatctc

SEQ ID NO: 960 - DNA, 479 bp, Arabidopsis thaliana
tcgagcggccgcccgggcaggtgcgcctcttcgtctccttcacagagatactcttcgtcaatttgaaaacttccagttttgaactgcagctgatttccgactaaattaaaggagtaatggagagtgtttcagtggaaacactttcagaaactggaaactcaaatgacggtcaaacgaatccagaattgattgataagcataagaagagatcggggaaaaagaagagaaaatcgaggaaactggataatgagttgaaggataatgattctcatatcagtagccaaattgggaacgcagatgaggccttttcatctcaagaaaaaaaaagaaggggaaaatgagaaatccactagtggaagtcaagttcggttatccgagaatcttttgtcttcattacctgcagagtcctgtcaacgagattcagtctcatgtgaagagcctagagctacactacatcatacagacccaatctcatgtga

SEQ ID NO: 961 - DNA, 479 bp, Arabidopsis thaliana
atagctattcctcctccacggcctaagcgtaaaccaaacaatccttatcctcgaaagacgggaagtggaacgatccttatgtcaaaaacgggtgtgaatgatggaaaagagtcccttggatcagaaaaagtgtcgcatcctgagatggccaatgaagatcgacaacaatcaaagcctgaagagaaaactctgcaggaagacaactgttcagattgtttcactcatcagtatctctctgctgcatcctccatgaataaaagttgtatagagacatcaaacgcaagcactttccgcgagttcttgccttcacgggaagagggaagtcagaataacagggtaagaaaggagtcaaactcagatttgaatgcaaaatctctggaaaacggtaatgagcaaggacctcagacttatccgatgcatatccctgtgctagtgccattggggagctcaataacaagttctctatcacatcctccttc

SEQ ID NO: 962 - DNA, 479 bp, Arabidopsis thaliana
cttttgtcactcatcttcacaggaaacaatggtgtttgtgaagtcctccaaatcgaatgcttacttcaagaggtaccaagtgaagttcaggagaaggagagatgggaagactgattacagggcaaggatccgtcttatcaatcaagacaagaacaagtacaacacccctaagtaccgttttgttgttcgatttaccaacaaagacattgtggcacagattgtatctgcaagcatagctggtgacattgttaaagcttcggcttacgcacatgagcttcctcagtatggactcactgttggtcttaccaactatgctgcagcttactgtactggccttcttttggctcgtcgtgttctgaaaatgctggaaatggatgatgagtacgagggaaacgtagaggccactggagaggacttttctgtggaaccaactgattccagaagacctttccgtgctcttcttgatgttggacttatca

SEQ ID NO: 963 - DNA, 479 bp, Arabidopsis thaliana
  misc_feature (1)...(479): n = A,T,C or G
cacttaaacaatcttacagatctgtttaatcagttttacacaggttaacacaacctgttactgaccaattcctaatctacccaactcacaacacagcaacagctatgtatccctctttgttcactcaccaagaaccctaatagcttctagcttagatcttgagattcacaaagcttgtgagataagacggctacctaacctaaagtctagcttccgattatataggtaacgacacaagcgtcattaacctatttcctaattctaagatatcttcaaatcttctttccatgatttgcttatatcttgaatgacttgttcatcacgttctggaaactccagcaaccaaacgcagctcgccacgtcatcatcatttgagtctcgctgcttcccgcatacagctccttcatgtgcttcacagagtcnccttgtgctcaaacatctatatatcttcattctccccctttttacttgaatgtgac

SEQ ID NO: 964 - DNA, 479 bp, Arabidopsis thaliana
tatgggtatttttgagaaacgtcgagctggaaagtttttcagctatgttcaagaatacgacgagaaggacccaaaaacacatgatggaatggatttgaggagagttacaactaaggatttgattgcgaaattcggtcttaaagaagatactattgactttattggtcatgcagtggcacttcactgtaatgacaatcatctccatcaacctgcctatgatactgtaatgagaatgaagctctacgcagagtcccttgcacgttttcaaggaggttcaccatatatctatcctctctatgggttgggagaattgcctcaggcatttgcacgacttagtgctgtctatggtgggacgtatatgttgaacaaacctgagtgcaaggtagagtttgacgaggagggtaaggtttctggtgttacatctgagggagagactgccaaatgcaagaaagttgtctgcgatccttcttacctaacca

SEQ ID NO: 965 - DNA, 479 bp, Arabidopsis thaliana
ttctgtttcactttctctctctctgtatactctctaaatgatggcaaaaaactgtaatttagtcagtgttctatgtgtatttttggtattgaccctctttaacaaacccatcaccgtcgccgggcagaatattccggcggtgggcttgttcacctttggtgactccaacttcgacgccggaaacaaacagactctcaccaaaaccttactccctcaaactttctggccgtatggaaaatcccgagatgatcccaacggcaaattctccgacggcctcatcgctccagacttcctcgctaaattcatgaggattccgatcgtgatcccgccggcccttcaaccgaacgtcaatgtctcacgtggagctagtttcgccgtcgctgatgctactctactcggagctccggtggaatctttgactctgaatcaacaagtgagaaagttcaatcaaatgaaagcagcaaattggaatgatgatt

SEQ ID NO: 966 - DNA, 479 bp, Arabidopsis thaliana
ggaaatggttgaaaggcatggagagttttgatttgctgcttaagatatatcatgtcgcagtgcgttgacggtatcaagcatttatgcacctctgttttagggtgttttgatcttgatttgtataaacaatctggtggccttggagatcctgaattgcttgcaagagacactgtttttagtgtgagtgaaatagaagctctttatgagctttttaagaaaatcagcagtgccgtgattgatgatgggctaataaacaaggaagagtttcagttggctttgtttaagacaaataaaaaagagagtttgtttgcagatcgggttttcgatttgtttgatacaaagcacaatggaatactggggtttgaggaatttgctcgtgctctctccgtctttcacccaaatgcgcctatagatgacaaaattcacttttcatttcagctatatgatcttaaacagcaagggtttatcgaacggcaaga

SEQ ID NO: 967 - DNA, 479 bp, Arabidopsis thaliana
  misc_feature (1)...(479): n = A,T,C or G
ccacgcgtccgctttccaccactgtgactaaatctaaacaatttcatggcgagtctctgtctctcatcgtcccggatcgtttctcttcaccaccagaaaccattcctctctcttaaactccggtctcgtccttcagatctctccggtctaggtcgccacacgagtcctgtttgcttcaatccgcttaggttatcgggtgatcgtcagcgaaccgctacggtatcaacgagggtggagaagcggcgaaagagaggatcgagtgtggtctgttatgctgctccgatttctgccaatagtctacaatggatctccaccatttcttgccttgcattgatgcttgcaaggggtactggtatacataagtcagttgttgtnccactattcgctctccacgcaccatcgagcatcgtcgcctggattaagggagagtatggtgtatgggcagcattcttggcgcttattgctcgacttttcttcac

SEQ ID NO: 968 - DNA, 479 bp, Arabidopsis thaliana
  misc_feature (1)...(479): n = A,T,C or G
tcgagcggccgcccgggcaggtaaactctgagacagagcaagaaaaagataaagtgagtgaaaaaatggcaacggtcacgattctctcacccaaatcgattccaaaggtcactgattccaaattcggagctagggtttctgatcagatcgtcaatgtcgtaaaatgcggcaaatccggccggagattgaagttagcgaagctggtctcagcggctggattgtcacagatcgaaccagacatcaacgaggaccctattggtcaattcgagactaatagcattgaaatggaagatttcaagtatggatattacgatggagctcatacttactatgaaggagaagttcaaaagggaacattttggggagcaattgctgatgatattgctgctgtggatcaaactaatgggtttcaaggttnnatctcttgtatgtttcttcctgctatagctcttgggatgtattttgatgctccgggtgag

SEQ ID NO: 969 - DNA, 479 bp, Arabidopsis thaliana
  misc_feature (1)...(479): n = A,T,C or G
ttctggcgcgtcgagcggccgcccgggcaggtattctttaaggctctggtagctttggcttttgatctaaaagctgagagtcaataangctttgtgctgagcatagcagagaagagttatggggaaaggagggatgtctcaaggagaaggctcaaaggttgaagaagaaaacatggctgcttggttggttggtatcaataccctcaagatccaaccttttcttcttccttccgttggtcctcatgatgtgagagttaggatgaaagctgttggtatttgtggaagtgatgttcattaccttaagaccatgagatgtgcggattttgtggtgaaagaaccgatggtgattggacatgaatgtgctgggatcattgaagaagtaggtgaagaagtgaaacannnagtggttggtgaccgtgtannncttgaacctgggattagttgttggagatgcaatctctgcagggaaggacgataca

SEQ ID NO: 970 - DNA, 479 bp, Arabidopsis thaliana
cttttttttttttttttttttatacaaacaccacgtatcatttcattatgaaattcatccacttttttagtactcagaaaatcgaatcaaaagtgttaattaagaccaaatttcataaatcacacaacttgtgagaactttatttagtcgaaatgttcccacaatcccacacattttatacgttcttacatatccatatatccccaacatgcataatcagatagaactcacaacaccatcgtcgttctccacaaccctaattcttggattcacaaccctacaattctgtcttatctctccttgagttccagtcaaaggtttaagatttcccatcctaatcattgcatcaacgaatgctccaaagaacacgaacgtgttgctgctgtattggtttactagtggaatcgtatcagctcctggagttgagaaaagcacttggtcactctgaatcaaacctttcccattaagcggacgcgtgg

SEQ ID NO: 971 - DNA, 479 bp, Arabidopsis thaliana
cggccgccttagggacatcttttgttatcttcgtcattctcatgcttctcttcacctggctttctcgcaaatctggaaatgctcccatttattacccgaatcggatccttaaagggctggagccatgggaaggcacctccttgactcgaaacccttttgcttggatgcgtgaagctttgacttcctctgaacaagatgtcgttaacttatccggcgtcgatactgctgtccactttgtcttcttgagcactgttctggggatatttgcttgttccagtcttcttctcctaccaactctactgcctctagccgctacagacaacaacataaagaacacaaagaatgcgacagataccacaagcaaaggaacttttagccaacttgataatctatcaatggctaacatcacaaaaaaaagttcgaggctgtgggcgttcctaggagctgtttactggatatctttggtcacatatttcttc

SEQ ID NO: 972 - DNA, 479 bp, Arabidopsis thaliana
  misc_feature (1)...(479): n = A,T,C or G
tgagatgggtagagatatacttcgatgactgtctctgtaacttaaacgacgacgtttcattcgcacttggaatcgctagcctcctctgttggggagtcgcagagattcctcaggtcatcactaacttccgtacaaagtcaagtaacggtgtctctctctccttcctcctcgcttgggtcgccggtgatatcttcaatctcgtcggttgtcttcttgaaccagctactttgccgactcagttctacacagccttgctttacacagtgagcactgtagtattggtgatccagactatttactacgattacatctacaaactttgtagacatagacgtaccaagatttgtcaaaaggatgaggaagatgaagagaagagaccattgaaaccaccaaagacgatgggatctgctatttccatcccannnngatcttacaaagattcttctcggagagagttctattacacgtcggcgagatcg

SEQ ID NO: 973 - DNA, 479 bp, Arabidopsis thaliana
ccacgcgtccgattcttgatagatacaaaaaacattttttcagacacaaattcataaaatctttgccttgagtagatcaaagttctttacattaatcgttagaagatgagccagtacgatcacaaccagtctgcaggagctaacccaccgccaccgatgtctacctgtacatcaccaccaccgccgattggttacccgactaaccaaccgagtcatggttcggtagctcagggtaaagtggaaaccaagtctaagggtgacggattcttcaaaggctgtcttgcggccatgtgttgctgttgtgccctggacatttgcttctaagccatttgggaattgggatggtctatttatgacgagtttatgtgaatgtgatgtgaattattattattattctctccagccttattgtataaattctctattttttgtttattattttcttgtaatactttgtgagacgaacaaaaaaaaaaaaa

SEQ ID NO: 974 - DNA, 479 bp, Arabidopsis thaliana
ataaatatgtgtaaaataagtgttggttgagtaaacaaaaactccaaaatggtcttccattttaacccttccatagcttcaacactctatctttaccaccagaaactactttctctccatctggactccaatccaccgcaaaaacctcatcagcatgaccaggaagatcttgttttaactttttcgtcctaatttcccatatcttgagagtagagtctttactgccactcaaaagcaatctactgtctgcggaccaactgacctgataaacaggtccaacatggccccggaaaactgtaacaaattgtcctgtgataccattccataacctaactgatttatcgaacgatgcacttgcaatccatttcccatcaggtgagaaatagacatgatttacaagctgttgatgaccggttaagcgctttttaggttgtttgctaacagatggttcccaaaggaacatagtgaaatcatcagaa

SEQ ID NO: 975 - DNA, 479 bp, Arabidopsis thaliana
tttttttttttttttttttttttttttttcctaagcaagcttgttttattattgggcctataggcccatgctattttttttccttatttatgcttgcagctcatttataaccttaaaaataacaacatactacacgctgaaagcgcattaattattccttattactacaacaagttcccaatttttaaatacgcttacataaaaagcccacaagtctctaaggattagttgaaattaacttcatacttagactgtcgatctggatgaaacagtccccaaaacttctcatacgttggttccttcttattctcatcgaacatagcgaatatataagtctctatagctttccctggccttctcggtgatccattcttcacatgttgtatcaaattgttaacataagtctttgcgttttccacactcgtcccgactgctccctctgtgggccaaccggtctccgacaccacgatttccaacga

SEQ ID NO: 976 - DNA, 479 bp, Arabidopsis thaliana
  misc_feature (1)...(479): n = A,T,C or G
ttttttttggtttaagatgaatctattaagtactgaactaaattcgttgattgaaacattaggaaagtgaatagatatgtataatttagattaataaacacacaagggtagactaattcagaaccagaaagagtgagagtgttagctacaaatgatacgatataaannnngagagattacaacaaaaacgaggtagagacaaaacgtagacaccagagatcagtggttggttacttaccatcttcttttttcctttgtcattgtctaatcagtagtaagcatgctgaatatggtggtggtggtgcgggtgaggatggtaaactggagggggtggagcagccaccggactgcagtaggtaccatatgctgtcggataactgaccggagaggtttggtaagaaccatgaaccgcctcgggtgagtattggtatggagggctcctgttgctgtagatggtaggtggggatgtggtgtatgct

SEQ ID NO: 977 - DNA, 479 bp, Arabidopsis thaliana
acccattcgtgcgtctctggctaattaagttaaaacactaatggacacttcttcttcacttttgttcttctccttcttcttctttatcatcatcgtcatcttcaacaagatcaacggtctcagatcatccccagcttcaaagaaaaaacttaatgatcatcatgttacatcccagagtcacggaccaaagtttccacacggaagcttgggatggcccgtcatcggtgaaaccatcgagttcgtctcttctgcttactcagaccgtcctgagagtttcatggacaagcgtcgtctcatgtatgggagagtgtttaagtcgcatatttttggaacggcgacgatcgtgtcgacggatgctgaagtgaacagagccgttttacagagcgactcgacagctttcgtgccgttttacccaaaaacggtaagggagctaatgggaaaatcgtcgatacttcttatcaacgggagtttacatagac

SEQ ID NO: 978 - DNA, 479 bp, Arabidopsis thaliana
agagcacacagtgcaaagaaacccactcgctataccggggtgtgaaccggttaggttcgagatactctggatgcatatctggttcccgacgaaccggtgtaccgggattttgttcgtcatggtctggcttacccaaaagccgatggaattttggtaaatacatgggaagagatggagcccaaatcattgaagtcccttctaaacccaaagctcttgggccgggttgctcgtgtaccggtctatccaatcggtcccttatgcagaccgatacaatcatccgaaaccgatcacccggttttggattggttaaacgaacaaccgaacgagtcggttctctatatctccttcgggagtggtggttgtctatcggcgaaacagttaactgaattggcgtggggactcgagcagagccagcaacggttcgtatgggtggttcgaccaccggtcgacggttcgtgttgtagcgagtatgtctcggc

SEQ ID NO: 979 - DNA, 479 bp, Arabidopsis thaliana
ctttgctttgacaatggcagaggaaattagattctttgaactcaacaccggagcgaagataccatccgtcggtctaggaacgtggcaggccgatcctggtctcgtcggaaacgctgtcgacgctgctgtgaagattggttatcgtcacattgattgtgctcaaatctatggcaatgaaaaagagattgggttagtcctgaagaaattgtttgatggtggagttgttaagcgtgaggaaatgttcatcacatccaaactatggtgtacttatcatgatcctcaagaagtgcctgaggcacttaatagaactctacaggatctgcagcttgactacgtcgatctgtatctcattcactggcctgttagcctcaagaaaggatctactggctttaaaccagagaacattttgccaactgatattcctagcacatggaaagcaatggaatcactctttgattcaggcaaggcccgtgctattg

SEQ ID NO: 980 - DNA, 479 bp, Arabidopsis thaliana
ccacgcgtccgggttggcctctgagaaagctgatgttggaccttatggagcttgggaaggtgaaacacctcaagtgtttatgactcccaaactagtgaacaacgagagtgaagctggcacagattcagtgcccttaaaaccagttgaacaggcattgattttggcccagtgccttctaattgaaaggggtagtcggcacgatgcaatgcaaagttgggatatggctccatatattgaggcaattgattctcaaaagtcaacctattttgttctacggtgtttttgtgacttattgcgtgttcgatgggaatcatctcgatatcgtacaagggaacgcgcccgggatatgatggataagctggttggagctattagcaagagcgatcctggagtatcaaatcggatccctttatgctatgcagtgtatcttcctactattcctgctttgagaaaggaatatggtgagcttctggtgagtt

SEQ ID NO: 981 - DNA, 479 bp, Arabidopsis thaliana
cggccgctatgaatcgaagaggagatatatatatacacagtatactaaatcagagggtttatgcatgtaacaatgcgatgaggagatgtaaattcagagaattgaagacgggacaacctcgtcgtccctggtgtagccatgaaccaaaaaatcggtgcagtttcttcgcaagccgtggttataagggttgtagaatcttccgtcaggtccccgcaaataactgaatctcttcgcgttccataattcgttggttgtaatattccgagctatcatataagactgtgagattgtcaatgtcatagtcgcaatgaaaatgagtaagtcgaaaaacagaaacacggcagcatcagggtgttcaatgactatatgtttaatccatgattctccgtggtgtacctgtgggatacctctccataatctttgaacagcagttgtgccaccaacgaatgatgttaaagctcccatgatcacaaagacta

SEQ ID NO: 982 - DNA, 479 bp, Arabidopsis thaliana
aacaacgaagtatcgtggaatccatttcatgggccgaagatttctcacttctcttcagtgaatctgggaaagtaatcgtttttggcttaattctgatttgggttcttacttatatagtcaacatgcttctggtttctcctgcttgtagaggtgtttatcttcagaccatagatccaaagccaattgatttctcagctagagcctcttatgcactttgctttcagattcctacttcaatccctaaaagagagtgtttgatgaggttaggaacggtcttttgttttaatcagaagcatagagagcagacaagttttaagaaacggtatgtatctacgcagaatgtggatcttcctcctattttaccaaagaacaagaagaaaccttatcctattccttttaagcaaatccaagaagaggctaggaaagataagaaacttgctcagatgggtatagagaaacagttggatcctcctaaaaat

SEQ ID NO: 983 - DNA, 479 bp, Arabidopsis thaliana
tcaaaaaccctaatttccccaccaatcagatcctccacaattatcccaccgacgaatcctatcaatctctctagatgactgaagatagcagcaaatcagtgtcggaacaaacccgacccgttttgagtgatttgacgaatcttccaaagaaaagagggatttcatcgattttgggtgatttgcttgatgaatctggtaagaccgttgctcatgaagtttcaaaagagaagttttcaaagaggttgtgtttagtcgtagatgatttggttaaggaaaatgctacacctttggatacaattcaagggtcttgttcgtttgataagaatacttctggtgatgctgttgacaaagaagagtatcatgatgctgtaatggaattctccagtggagattgcaaagcattgaaggaaagcaagtctatacagatctattttgaacctggtgatagagacggtgcacgagagttaaacgcagctgct

SEQ ID NO: 984 - DNA, 479 bp, Arabidopsis thaliana
aaggcggctagagatttgagtgatctaactggagaaggaaatattgaaagtatgctttcagttgagatgggtttgagagagctagcatcattaaaggtggaggatgctgttgtgcttatattcgcccagcagagaaagttgagtttggttcgccacactgtttccgactccaaaggtcatggagaatccagatttatcgatgcatatggtaacggaaaagtctcactaactcttttctctttgttttccacccttatgtagaggttcttggggtcgaaccctcaacaccttgaatgttgtggaagggtttcactagtatagccacatctttaacccaaaaaaagagtctagccacatcctctcggtctttgacatagtgcatgcgttgttgatttagtaggagtaaattgcatctatgtcccctaccttgaaggattttctgtggtttcaaattttacctttactcaacgcataaaatc

SEQ ID NO: 985 - DNA, 479 bp, Arabidopsis thaliana
  misc_feature (1)...(479): n = A,T,C or G
ttttgataacgcattcactgctatgatttccttccagacgaagaattccgagcgcatattcagcacagtaatgacctacatgcctcaagatttccggggaacgctcatcagacagcagaaggagaggtcggagaggaacaaacaggcggaggttgatgcgttggtcagctctggagggagcatacgcgacacatatgctcttctttggaagcagcaaatggagaggaggaggcagttggctcagctaggctctgccactggtgtctacaaaaccctggtcaagtacttggnnggggttccacaggtgttgttggattttattcgacaaataaacgatgatgatgggccaatggaagaacagnnnnnacgttatggaccccctctatacagtctcacaaaaatggtgatcgcaattcgggttttcctaacacttctgtgggaaagatatgataccttcaaactgagtaaagaccaaatga

SEQ ID NO: 986 - DNA, 478 bp, Arabidopsis thaliana
tcgagcggccgcccgggcaggtggacacttaaagagagaaacaaatccttcttctaaaatattcttcaatcttcttctcgaagcttctccaaaaatggcgattacttcttctagaaccgccagatcaaacggatctgcttcgctccgatccaaatcaccgtccggtcgattctgtggcgtttactcaaaccgtgtgccgtcatcatctccgtcgtcgtcaggtttcgcttcttccacaagctcaagtttctcgtcaccgtcgacagcgtttttcagcagccacaatcagaacaaccaccaccaacacagatctgcttctccgacgcgtgtgaatctattcacatcagcaccgatgacgcaatcgtttcgttactcaatcgataacagatctatatcaccgaatcgatctatcgctgtttcctccaacaaacctagcaatcatcacaagattccggattcgaggagaagatgtatgtgc

SEQ ID NO: 987 - DNA, 478 bp, Arabidopsis thaliana
gtttcatcgctgaatcttttctcgagctcaacttcttcatctactgcatctgacgaggaagaagatcatcatcaggttaagagctcgagaaagaagaggaagtattggaaagggttgtttacgaagttgacaaaagagttaatggagaaacaagagaagatgcaaaaaaggttcttggaaacactggagtatcgtgagaaagagagaatctcaagagaagaagcttggagggtccaagagatagggagaatcaacagagaacacgaaacattaatccatgagaggtccaatgctgcagctaaagacgctgcaatcatatccttcttacacaaaatctcaggaggacaaccacaacaaccgcaacaacataatcataaaccatcacaaaggaaacaatatcaaagcgatcattcaataacgtttgagagtaaagagccgagggcggttctattggatacaacaataaagatggggaatt

SEQ ID NO: 988 - DNA, 478 bp, Arabidopsis thaliana
  misc_feature (1)...(478): n = A,T,C or G
ttggcgatcgaatcaatctcactccctccctcccttaagtcttgttgaatctgctgaattgttttataaagagttactttggcaaaatggaaaatccggcgaagagagtgttgatgacatccaacggcgacgaggtgtcccgaaacatcgctttccatctagccaaacacggttgcaagttggtaatgatgggaaatgagggttccctannnagcattgtagacaagattagagattccattgagggagccttccctgccgatgttatagcactcgacatggaatctgactctgaagttgcttttcatgccgctgtccaaaaggcatgggaactttccggccatttcgatgcttttctcaactcttatacctaccaaggaaaggtgcaggacattcttcaagtctctcaagatgagttccacagaatcacaaagatcaatctcaccgctccatggtttctcttgaaggctgtagccac

SEQ ID NO: 989 - DNA, 478 bp, Arabidopsis thaliana
cagatgcttgaaggagatggattagctgagagatgggctgcttcacatgaccattcacatttctaccatgccaacatgtcttacaggactattacctctactgatggcaacaaccaaaccaaacatctgtttggctcctcaggatttgaagatgaagatgataatcaagcgttagattcattcgccatggaactatctggtccaaggtagtaaatcttggacacagaaagaaacagatataatatccccatgacttcaatttttgtttttgagatgatatagacatgtaaatggttatcaaacctttgaaaaaattgagattctgggtctaatggttaatattttggatgtatatattaaggtttttttaaatgtgttggttttggtctgttatccaaatttgtaaaatttgaggtcctgtgaaagcaatttttggtcaaactctgagattcatgtcttattatcaaaaaatttaccg

SEQ ID NO: 990 - DNA, 478 bp, Arabidopsis thaliana
ctgggttatgggaaatgcaaaagggttgaagaaactgaagtccctctcagtaatgtcgtgcagaggtatgaccgatgttgggctcgaagctgttggaaatggttgccctgatctgaagcatgtctctctgaacaaatgcttgcttgtttctggtaaaggacttgtcgctttggccaaatctgcattgtcacttgaaagtttgaaacttgaagaatgccacaggatcaaccagtttggtcttatgggttttctcatgaactgtggctcaaagttgaaagctttctctttggcaaactgtctgggcatcagtgacttcaactcagaatcctctctgccatcacccagttgcagctctttacgttctctgtcaatccgatgctgccctgggtttggggatgcaagtctcgctttcttgggaaagttctgtcatcagcttcaggatgttgaactctgtggactaaacggagtgacagatgca

SEQ ID NO: 991 - DNA, 478 bp, Arabidopsis thaliana
cctctgctaccttaagctgagagagtcacagtctcgtctctatctctcctctttgcctttttccactcactacacgccaaacccgacgacatggcagctacctctctcactgcccctccttctttctccggtctccgccgcatttctcccaagctcgacgctgccgccgtctcctcccaccaatccttcttccaccgcgtcaattcctctacccgtctcgtttcttcctcttcttcttctcatcgctcccccagaggtgttgttgccatggctggatccggaaagtttttcgttggaggaaactggaagtgtaacgggactaaggactccatcgccaagcttatctccgatctcaacagtgcaaccttggaagcagatgtagatgttgttgtgtcacctccatttgtctacatcgaccaggtcaaatcctcgttgacagaccgtattgacatatcaggtcagaactcttgggttggga

SEQ ID NO: 992 - DNA, 478 bp, Arabidopsis thaliana
aaactctttttacgtcaagcaatggaggatcttgatccaacctacatccaagcaccagagcatagatcagattcgaatttcatccctaaccaaccagaagaaatacccgtgattgatctctcgcgcctcgatgaccccgaagatgtccaaaacgttatctcagagatcggtgatgcttgtgaaaaatggggattttttcaggtgcttaatcatggtgtgccttctgacgcaaggcaacgtgtggagaagactgtgaagatgtttttcgatttgcctatggaagagaagataaaggtgaagagagacgatgtgaatcctgtagggtatcatgatggagaacacaccaagaacgttaaagattggaaagaagtgtttgatatttatttcaaagatccaatggtcattccttcaaccactgatcctgaagatgaaggcttaagacttgtttacaacaagtggcctcaatctccttctgatt

SEQ ID NO: 993 - DNA, 478 bp, Arabidopsis thaliana
tagtagagacggaaagagttatagcaccaacctggcgttcactcctccagagtatctcagaacaggtcgtgtgacaccagaaagtgtgatgtacagttatggaactctgttgcttgatcttcttagtggaaaacacattcctccaagtcatgctctggacctcatacgggacaggaacattcaaatgttgatcgactcatgcttggagggtcaattttcaagcgacgacgggactgaactaatacggttagcttctagatgcttgcagtatgagccccgggagcggcctaacccgaagtctttagttactgcaatgatccctctacagaaggatcttgagactccttctcatcaactgatgggcataccaagcagcgcctcaacgacacccctttcaccacttggagaagcatgcctaagaacagatctaactgccatacatgagattcttgaaaagcttagctataaagatgacgag

SEQ ID NO: 994 - DNA, 478 bp, Arabidopsis thaliana
cggccgcgcgatacacgagtctaatgttggatgagtctgtacagtacccgatttgtagatgttatcatatatatacacacttaatatttctacgatctgattaccaaaaccctacacaagaaaaatttgaacaaaatcaaatgttctttcttttttcaccaatgctgtgtttaatctcccctaaccggggaggcgagaggggacattggaaggaatgagagctcaaagattcagactttaacttgagctggtcgtagggctagtgccaaaggttgaagatggtgtaactgaagctggcatttgttgagaagctccttcagcccaagaactctcagaaattggggaatatggtcttgtcactttgtttttcaccattccctttaaagcattctgcccatacaagttaatggcttgatcgatagctgagtaaacatcaaaggcctgcttgctgttgggaatgcatttgacaacacggaat

SEQ ID NO: 995 - DNA, 478 bp, Arabidopsis thaliana
caaggcagtccgtgacccgttcacccgccacgtctacaccaacatgtttgatgcactcatggactcgacatactcagccatgaaagctcttggatacggtgatgttaacattgtcgttggcgagactggctggccatctgcttgtgacgcaccttggtgctcgcctgcgaatgctgcttggttcaacctcaacattatcaaacgtgcacaaggccaagggacacctctcatgcctaacagacggttcgagacatacattttcggtctcttcaacgaagaaggcaaacccggtccgaccgcagagcgtaactggggacttttccgagcagatttctccccggtttacgatgttggtcttctccgaaacggacaaggcggtggaggccgcccagcattgccctcacctagtactgccggcggtaaatggtgtgtagcgaggtccggggcgacgaatactcagctgcaagacagtattaat

SEQ ID NO: 996 - DNA, 478 bp, Arabidopsis thaliana
gcggccgcaaagcatataatatacaaaaacaagtctgaaataacctgaataggcagacaaatacattacacttgccttgttctatggtgatctcactggtttctttctttttaattttgtatctctctcagcaaaagcattgaactagcacagctccacatttcacctggaccataatatcgaacaatgcatgtcttttgtgtcccaaactcgttattcatgcctcattcttcccagagtttggatactcacaatcccaccaagaatccaacaagtaaatcatttgaatgtttgttaatcttttttttttcttttctcttttagaactttttttttttcctttttaagcttttagttttcatatttaggtgaacttaccaatagtttcgagttctgaagctgtcggtcgtccaaagcaaacacactagggttgctctgattcttgttatttattttttattttcctttttcttgactt

SEQ ID NO: 997 - DNA, 478 bp, Arabidopsis thaliana
tcgagcggccgcccgggcaggtggaaagagtgggtttggatctgcttctactgctgaagatgttactcaagccattgatgccagtcatctcactgccatcatcacaggtggaacaagtgggattggattggaggcagctagagtgttagcaatgagaggagctcatgtcatcattgccgcaagaaacccaaaagctgctaatgagtctaaagagatgattcttcagatgaaccctaatgctcgcgtcgactatctccagatcgatgtctcttccatcaaatcagtcagatccttcgttgatcagtttcttgcccttaatgttcctctcaacattctcataaacaatgcaggtgttatgttttgtcctttcaagctcaccgaagatgggattgaatcacaattcgcaacaaaccacattggtcattttctgttgacgaatctgcttctggacaaaatgaaaagtacctcggccgcgacc

SEQ ID NO: 998 - DNA, 478 bp, Arabidopsis thaliana
  misc_feature (1)...(478): n = A,T,C or G
ttttttttttttttataacataagcttctgaattagaagtcaaccaattgtcatttataatttttttctcacttgttgtcattaaactaagaattacagaaannnnaaacatatagccaagccaaatggtggaagaaaaaagcacaaaactcgtaacaaaaactgacaaagatacactaaagttcggataagatagcagggatgtaatgggagagttctgcggtgagagactgaaatccattgacaagctgagtatggaattcctgatcttcttctccgattaatctaaagtgaaccctaatggctcgcttacaaaccgccatgaattcaagcagtgccgcgattagttgctgcagttcctgtgaacgcaatctcgttgcaggctctcctgataagaaagctgtgcacacgctcaacaccccactgttcacctgcactgcaacacttccttggagaatcctctgcagactttgaagcc

SEQ ID NO: 999 - DNA, 478 bp, Arabidopsis thaliana
ttttttttttttttttttttttttttttttagcaacttaacaaatgaagatcttatacttataaaatcaagactttaatcatacattaaagaaaaagaagtaaagtctaagaatctaaaccaagtggttcccattgaggaactctcttactgaagaacctcccaataactctggaatcaagaatctcaagagctcctccagatttaacacatcttggagtcttatactgattcaaagatgatccttgtgagacacaaaaatccattaacgaatcaaacgtgcccaaactcaccactcttatctccaatggcccaatcgacttgtccctgttcctgcatctcctgtagacgtaatccaaacaatcctcaacctcagagcaacaatcctccattgtcttgtcgtcaagctttggtgggtcattgctgtgacgtggctttagctcccagaagagcacgtaatgccctgggattgatgacgt

What is claimed is:

1. A nucleic acid comprising a sequence capable of hybridizing under stringent conditions to a sequence set forth in SEQ ID NO: 1 to 999, or a fragment thereof.

2. A vector comprising the nucleic acid of claim 1.

3. The vector of claim 2, wherein said vector comprises regulatory elements for expression, operably linked to said sequence.

4. A polypeptide encoded by the nucleic acid of claim 1.

5. A nucleic acid comprising: an ATG start codon; an optional intervening sequence; a coding sequence capable of hybridizing under stringent conditions as set forth in SEQ ID NO: 1 to 999; and an optional terminal sequence, wherein at least one of said optional sequences is present, and wherein:
ATG is a start codon;
said intervening sequence comprises one or more codons in-frame with said coding sequence, and is free of in-frame stop codons; and
said terminal sequence comprises one or more codons in-frame with said coding sequence, and a terminal stop codon.

6. The nucleic acid of claim 5, wherein said nucleic acid is expressed in Arabidopsis thaliana.

7. The nucleic acid of claim 5, wherein said nucleic acid encodes a plant protein.

8. The nucleic acid of claim 7, wherein said plant is a dicot.

9. The nucleic acid of claim 8, wherein said dicot is Arabidopsis thaliana.

10. The nucleic acid of claim 7, wherein said plant protein is a naturally occurring plant protein.

11. The nucleic acid of claim 7, wherein said plant protein is a genetically modified plant protein.

12. The nucleic acid of claim 5, wherein said nucleic acid encodes a fusion protein comprising an Arabidopsis thaliana protein and a fusion partner.

13. The nucleic acid of claim 5, wherein said nucleic acid encodes a fusion protein comprising a plant protein and a fusion partner

14. A transgenic plant comprising an exogenous nucleic acid, wherein said nucleic acid comprises transcription regulatory sequences operably linked to a sequence capable of hybridizing under stringent conditions to a sequence set forth in SEQ ID NO: 1 to 999 or a fragment thereof, wherein said sequence is expressed in cells of said plant.

15. The transgenic plant of claim 14, wherein said plant is regenerated from transformed embryogenic tissue.

16. The transgenic plant of claim 14, wherein said plant is a progeny of one or more subsequent generations from transformed embryogenic tissue.

17. The transgenic plant of claim 14, wherein said sequence capable of hybridizing under stringent conditions to a sequence set forth in SEQ ID NO: 1 to 999 encodes a plant protein.

18. The transgenic plant of claim 14, wherein said plant protein is a naturally occurring plant protein.

19. The transgenic plant of claim 14, wherein said plant protein is a genetically altered plant protein.

20. The transgenic plant of claim 14, wherein said sequence expressed in cells of said plant is an anti-sense sequence.

21. The transgenic plant of claim 14, wherein said sequence expressed in cells of said plant is a sense sequence.

22. The transgenic plant of claim 14, wherein said sequence is selectively expressed in specific tissues of said plant.

23. The transgenic plant of claim 14, wherein said specific tissue is selected from the group consisting of leaves, stems, roots, flowers, tissues, epicotyls, meristems, hypocotyls, cotyledons, pollen, ovaries, cells, and protoplasts.

24. A genetically modified cell, comprising an exogenous nucleic acid, wherein said nucleic acid comprises transcription regulatory sequences operably linked to a sequence capable of hybridizing under stringent conditions to a sequence set forth in SEQ ID NO: 1 to 999, wherein said sequence is expressed in cells of said plant.

25. A method of screening a candidate agent for its biological effect; the method comprising:
combining said candidate agent with one of:
a genetically modified cell according to claim 24, a transgenic plant according to claim 14, or a polypeptide according to claim 4; and
determining the effect of said candidate agent on said plant, cell or polypeptide.

26. A nucleic acid array comprising at least one nucleic acid as set forth in SEQ ID NO: 1-999 stably bound to a solid support.

27. An array comprising at least one polypeptide encoded by a nucleic acid as set forth in SEQ ID NO: 1-999, stably bound to a solid support.
